(19) United States
(12) Patent Application Publication
(10) Pub. No.: US 2025/0163148 A1
(43) Pub. Date: May 22, 2025

(54) ANTI-CAR COMPOSITIONS AND METHODS

(71) Applicants: Novartis AG, Basel (CH); The Trustees of the University of Pennsylvania, Philadelphia, PA (US)

(72) Inventors: Saar Gill, Philadelphia, PA (US); Marco Ruella, Ardmore, PA (US)

(21) Appl. No.: 18/750,780

(22) Filed: Jun. 21, 2024

Related U.S. Application Data
(63) Continuation of application No. 16/759,898, filed on Apr. 28, 2020, now abandoned.
(60) Provisional application No. 62/579,815, filed on Oct. 31, 2017.

(51) Int. Cl. C07K 16/28; A61K 38/00; A61K 39/00; A61K 40/11; A61K 40/31; A61K 40/42; C07K 16/42; C12N 5/0783; C12N 15/79

(52) U.S. Cl. CPC C07K 16/2803; A61K 40/11; A61K 40/31; A61K 40/4211; C07K 16/4208; C12N 5/0636; C12N 15/79; A61K 38/00; A61K 2039/505; A61K 2239/48

(57) ABSTRACT

The invention provides compositions and methods for treating conditions or diseases associated with expression of a target chimeric antigen receptor (CAR) as described herein. The invention also relates to an anti-target CAR specific to the target CAR as described herein, vectors encoding the same, and recombinant T cells comprising the anti-target CARs of the present invention. The invention also includes methods of administering a genetically modified T cell expressing an anti-target CAR as described herein.

### CROSS-REFERENCE TO RELATED APPLICATIONS

[0001] The present application is a continuation of and claims priority to U.S. application Ser. No. 16/759,898, filed Apr. 28, 2020, which is a 35 U.S.C. § 371 national phase application from, and claims priority to International Application No. PCT/US2018/058514, filed Oct. 31, 2018, and published under PCT Article 21 (2) in English, which claims priority under 35 U.S.C. § 119 (e) to U.S. Provisional Application No. 62/579,815, filed on Oct. 31, 2017, all of which applications are incorporated by reference herein in their entireties.

### REFERENCE TO AN ELECTRONIC SEQUENCE LISTING

[0002] The Sequence Listing submitted herewith as a xml file named “046483-7185US2.xml,” created on Jun. 21, 2024 and having a size of 1.72 MB, is incorporated herein by reference in its entirety.

### FIELD OF THE INVENTION

[0003] The present invention relates generally to the use of immune effector cells (e.g., T cells, NK cells) engineered to express a Chimeric Antigen Receptor (CAR) to treat a disease associated with expression of a tumor antigen.

### BACKGROUND OF THE INVENTION

[0004] Adoptive cell transfer (ACT) therapy with autologous T-cells, especially with T-cells transduced with Chimeric Antigen Receptors (CARs), has shown promise in hematologic cancer trials.

### SUMMARY OF THE INVENTION

[0005] The present invention pertains, at least in part, to the use of immune effector cells (e.g., T cells or NK cells) engineered to express an anti-target CAR polypeptide that binds to a target CAR, as described herein, to treat cancer associated with expression of said target CAR. For instance, to treat a patient having cancer cells that express a target CAR, an anti-target CAR can be administered to specifically kill the cancer cells that express the target CAR.

[0006] In certain aspects, the present disclosure provides an isolated nucleic acid molecule encoding an anti-target CAR (chimeric antigen receptor) polypeptide, wherein the encoded anti-target CAR polypeptide comprises:
[0007] a) a ligand, e.g., an extracellular ligand, that binds to a target CAR polypeptide,
[0008] b) a transmembrane domain, and
[0009] c) an intracellular signaling domain comprising a stimulatory domain.

[0010] The present disclosure also provides an isolated anti-target CAR (chimeric antigen receptor) polypeptide, which comprises:
[0011] a) a ligand, e.g., an extracellular ligand, that binds to a target CAR polypeptide,
[0012] b) a transmembrane domain, and
[0013] c) an intracellular signaling domain comprising a stimulatory domain.

[0014] The present disclosure also provides a vector comprising a nucleic acid molecule encoding an anti-target CAR described herein.

[0015] The present disclosure also provides a cell comprising a nucleic acid described herein or a vector described herein. The present disclosure also provides a cell comprising an anti-target CAR polypeptide described herein. The present disclosure also provides a cell engineered to express an anti-target CAR polypeptide described.

[0016] The present disclosure also provides a method of making a cell comprising transducing a cell, e.g., an immune effector cell, e.g., T cell, with a nucleic acid described herein or a vector described herein.

[0017] The present disclosure also provides a method of generating a population of RNA-engineered cells comprising introducing an in vitro transcribed RNA or synthetic RNA into a cell, where the RNA comprises a nucleic acid encoding an anti-target CAR polypeptide described herein or a vector described herein.

[0018] In an aspect, disclosed herein is a method of treating, a subject having, or at risk of having, an unwanted effect (e.g., a disease or condition) associated with expression of a target CAR, comprising administering to the subject an effective number of cells comprising an anti-target CAR polypeptide described herein.

[0019] In some embodiments, the unwanted effect associated with expression of a target CAR comprises one or more of: B cell aplasia (e.g., lower number of B cells or no B cells); cytokine release syndrome (CRS); or a neurologic toxicity.

[0020] In some embodiments, the unwanted effect associated with expression of a target CAR is B cell aplasia. In some embodiments, administration of the anti-target CAR results in amelioration of unwanted effects associated with expression of a target CAR, e.g., reduction of B cell aplasia.

[0021] The present disclosure also provides, in some aspects, a method of treating a subject, e.g., mammal, having a disease or condition associated with expression of a target CAR (e.g., a disease in which a target CAR is expressed) comprising administering to the mammal an effective number of cells comprising an anti-target CAR polypeptide described herein. Similarly, in some aspects, the disclosure provides the use of a plurality of cells comprising an anti-target CAR polypeptide described herein in the manufacture of a medicament for treating a disease, e.g., a disease or condition associated with expression of a target CAR. In related aspects, the disclosure provides a plurality of cells comprising an anti-target CAR polypeptide described herein, for use in treating a disease or condition, e.g., a disease or condition associated with expression of a target CAR.

[0022] The present disclosure also provides, in some aspects, a method of reducing the number of target CAR-expressing cells present in a subject, e.g., mammal, e.g., in the circulation of the subject, comprising administering to the subject an effective number of cells described herein, or an effective number of cells comprising a nucleic acid described herein, a vector described herein, or an anti-target CAR polypeptide described herein.

[0023] In some embodiments, the ligand comprises a cognate antigen molecule or an antibody molecule that binds to the target CAR polypeptide. In some embodiments, the ligand comprises an antibody molecule (e.g., an anti-idiotypic antibody molecule) that binds to the target CAR polypeptide, e.g., binds an extracellular domain of the target CAR polypeptide. In some embodiments, the ligand binds an antigen binding domain in the target CAR polypeptide, a hinge domain in the target CAR polypeptide, or a junction between an antigen binding domain and a hinge domain in the target CAR polypeptide. In some embodiments, the ligand comprises a cognate antigen molecule that binds the target CAR polypeptide. In some embodiments, the ligand is extracellular. In some embodiments, the anti-target CAR comprises a ligand that binds to a target CAR, a transmembrane domain, and an intracellular signaling domain, e.g., comprising a primary signaling domain and/or a costimulatory signaling domain.

[0024] In some embodiments, the target CAR polypeptide is a CD19CAR polypeptide and the ligand comprises an anti-idiotypic antibody that binds said CD19CAR polypeptide. In some embodiments, the target CAR polypeptide is a CD19CAR polypeptide and the ligand binds said CD19CAR polypeptide, e.g., the ligand comprises CD19 or a fragment thereof that binds said CD19CAR polypeptide.

[0025] In some embodiments:
[0026] (i) the target CAR polypeptide is a CD33CAR polypeptide and the ligand binds said CD33 CAR polypeptide, e.g., the ligand comprises CD33 or a fragment thereof that binds said CD33CAR polypeptide, or the ligand comprises an antibody molecule that binds said CD33CAR polypeptide;
[0027] (ii) the target CAR polypeptide is an EGFRvIIICAR polypeptide, and the ligand binds said EGFRvIIICAR polypeptide, e.g., the ligand comprises EGFRvIII or a fragment thereof that binds said EGFRvIIICAR polypeptide, or the ligand comprises an antibody molecule that binds said EGFRvIIICAR polypeptide;
[0028] (iii) the target CAR polypeptide is a mesothelinCAR polypeptide, and the ligand binds said mesothelin CAR polypeptide, e.g., the ligand comprises mesothelin or a fragment thereof that binds said mesothelinCAR polypeptide, or the ligand comprises an antibody molecule that binds said mesothelinCAR polypeptide;
[0029] (iv) the target CAR polypeptide is a BCMACAR polypeptide, and the ligand binds said BCMACAR polypeptide, e.g., the ligand comprises BCMA or a fragment thereof that binds said BCMACAR polypeptide, or the ligand comprises an antibody molecule that binds said BCMACAR polypeptide;
[0030] (v) the target CAR polypeptide is a CD20CAR polypeptide, and the ligand binds said CD20CAR polypeptide, e.g., the ligand comprises CD20 or a fragment thereof that binds said CD20CAR polypeptide, or the ligand comprises an antibody molecule that binds said CD20CAR polypeptide;
[0031] (vi) the target CAR polypeptide is a CD22CAR polypeptide, and the ligand binds said CD22CAR polypeptide, e.g., the ligand comprises CD22 or a fragment thereof that binds said CD22CAR polypeptide, or the ligand comprises an antibody molecule that binds said CD22CAR polypeptide;
[0032] (vii) the target CAR polypeptide is a CD123CAR polypeptide, and the ligand binds said CD123CAR polypeptide, e.g., the ligand comprises CD123 or a fragment thereof that binds said CD123CAR polypeptide, or the ligand comprises an antibody molecule that binds said CD123CAR polypeptide; or
[0033] (viii) the target CAR polypeptide is a CLL-1CAR polypeptide, and the ligand binds said CLL-1CAR polypeptide, e.g., the ligand comprises CLL-1 or a fragment thereof that binds said CLL-1CAR polypeptide, or the ligand comprises an antibody molecule that binds said CLL-1CAR polypeptide.

[0034] In some embodiments, the target CAR polypeptide comprises i) an antigen binding domain, e.g., an antigen binding domain that binds a tumor antigen described herein, e.g., an anti-CD19 binding domain, ii) a transmembrane domain, and iii) an intracellular signaling domain.

[0035] In some embodiments of the methods and uses described herein, the disease or condition associated with expression of a target CAR is a cancer, e.g., a cancer described herein. In some embodiments, the subject having a disease or condition associated with expression of a target CAR comprises a cell, e.g., comprises a population of cells, expressing the target CAR. In some embodiments, the cell is a cell from a cancer, e.g., a hematological cancer, e.g., a B cell cancer (e.g., ALL), a T cell cancer, or a myeloid leukemia (e.g., AML). In some embodiments, the disease associated with expression of a target CAR is a B-cell aplasia.

[0036] In some embodiments of the methods and uses described herein, the disease or condition associated with expression of a target CAR is a cancer, e.g., a cancer described herein. In some embodiments, the subject having a disease or condition associated with expression of a target CAR comprises a cell, e.g., comprises a population of cells, expressing the target CAR. In some embodiments, the cell, e.g., the target CAR-expressing cell, is a normal cell, e.g., a non-malignant cell, e.g., a normal or non-malignant hematopoietic cell, e.g., B cell, a myeloid cell, or an immune effector cell, e.g., a T cell, or an NK cell.

[0037] In some embodiments, the target CAR-expressing cell is a cancer cell, e.g., a cell from a cancer described herein.

[0038] In some embodiments, the subject has a cancer, e.g., a cancer described herein, or B-cell aplasia.

[0039] In some embodiments of the methods and uses described herein, the anti-target CAR cells are administered to the subject in about the same amount or an amount greater than the number of target CAR cells, e.g., in the subject. In some embodiments, the number of target CAR cells is estimated based on, e.g., the number of target CAR cells present in the subject e.g., at least 1 week, 2 weeks, 3 weeks, 4 weeks or more post-administration of the CAR-expressing cell therapy. In some embodiments, the number of target CAR cells is estimated based on, e.g., the number of target CAR cells present in a sample from the subject, e.g., an apheresis sample (e.g., prior to anti-target CAR transduction). In some embodiments, the number of target CAR cells is estimated based on, e.g., the number of target CAR cells that were administered to the subject, e.g., number of target CAR cells that were initially administered to the subject. In some embodiments, the anti-target CAR cells are administered at a ratio of at least 1:1, e.g., at least 2:1, 3:1, 4:1, 5:1, 6:1, 7:1, 8:1, 9:1, 10:1, 15:1, 20:1, 50:1, 100:1 or 1000:1, with the target CAR cells. In some embodiments, the number of anti-target CAR cells that are administered to the subject are at least 1.5 fold, e.g., at least 1.5-100 fold, e.g., 1.5-5, 5-10, 10-15, 15-25, 25-35, 35-45, 45-55, 55-65, 65-75, 75-85, 85-95, or 95-100 fold, more than the number of target CAR cells in the subject

[0040] In some embodiments, any of the methods and uses described herein comprises evaluating, e.g., estimating, the number of target CAR cells in the subject, e.g., at least 1 week, 2 weeks, 3 weeks, 4 weeks or more post-administration of the CAR-expressing cell therapy. In some embodiments, the evaluating step comprises acquiring a sample, e.g., a blood sample, e.g., plasma sample, from the subject and determining:
[0041] (i) the number of target CAR cells present in the blood sample; and/or
[0042] (ii) the number of target CAR cells present in the subject, e.g., in the circulation of the subject.

[0043] In some embodiments, based on the determination of the number of target CAR cells, the method comprises administering the same or greater amount of anti-target CAR cells to the subject. In some embodiments, the subject is administered the same or greater amount, e.g., at least 1.5 fold, e.g., at least 1.5-100 fold, e.g., 1.5-5, 5-10, 10-15, 15-25, 25-35, 35-45, 45-55, 55-65, 65-75, 75-85, 85-95, or 95-100 fold, more anti-target CAR cells compared to the number of target CAR cells determined in (ii).

[0044] In some embodiments, any of the methods and uses described herein comprises evaluating, e.g., estimating, the number of anti-target CAR cells in the subject, e.g., at least 1 week, 2 weeks, 3 weeks, 4 weeks or more post-administration of the anti-target CAR-expressing cell therapy. In some embodiments, the evaluating step comprises acquiring a sample, e.g., a blood sample, e.g., plasma sample, from the subject and determining:
[0045] (iii) the number of anti-target CAR cells present in the blood sample; and/or
[0046] (iv) the number of anti-target CAR cells present in the subject, e.g., in the circulation of the subject.

[0047] In some embodiments of the methods or uses described herein, the subject is a mammal, e.g., a human.

[0048] In some embodiments, the subject was previously administered target CAR-expressing cells. In some embodiments, the subject experienced relapse, e.g., relapse characterized by cancer cells that are negative for the tumor antigen bound by the target CAR. In some embodiments, the subject had or has a disease associated with expression of CD19 and the relapse is a CD19-negative relapse, e.g., wherein some or all of the cancer cells in the subject are CD19-negative.

[0049] In some embodiments, the subject had:
[0050] (i) a disease associated with expression of CD33, and the relapse is a CD33-negative relapse;
[0051] (ii) a disease associated with expression of EGFRvIII, and the relapse is a EGFRvIII-negative relapse;
[0052] (iii) a disease associated with expression of mesothelin, and the relapse is a mesothelin-negative relapse;
[0053] (iv) a disease associated with expression of BCMA, and the relapse is a BCMA-negative relapse;
[0054] (v) a disease associated with expression of CD20, and the relapse is a CD20-negative relapse;
[0055] (vi) a disease associated with expression of CD22, and the relapse is a CD22-negative relapse;
[0056] (vi) a disease associated with expression of CD123, and the relapse is a CD123-negative relapse; or
[0057] (vii) a disease associated with expression of CLL-1, and the relapse is a CLL-1-negative relapse.

### Anti-Target CAR-Encoding Nucleic Acids

[0058] In some aspects, the disclosure provides an isolated nucleic acid molecule encoding an anti-target CAR molecule. In one embodiment, the anti-target CAR comprises: i) a ligand that binds to a target CAR, ii) a transmembrane domain, and iii) an intracellular signaling domain, e.g., comprising a primary signaling domain and/or a costimulatory domain.

[0059] In some embodiments, the ligand of the isolated nucleic acid molecule encoding the anti-target CAR polypeptide molecule comprises a cognate antigen molecule or an antibody molecule that binds to the target CAR. In some embodiments, the ligand comprises an antibody molecule that binds to the target CAR, e.g., an anti-idiotypic antibody molecule that binds the target CAR, e.g., an anti-idiotype antibody molecule described herein.

[0060] In one embodiment, the isolated nucleic acid molecule comprises a sequence encoding a costimulatory domain, e.g., a costimulatory domain described herein. In embodiments, the intracellular signaling domain comprises a costimulatory domain. In embodiments, the intracellular signaling domain comprises a primary signaling domain. In embodiments, the intracellular signaling domain comprises a costimulatory domain and a primary signaling domain.

[0061] In some embodiments, the isolated nucleic acid molecule comprises a primary signaling domain. In certain embodiments, the encoded primary signaling domain comprises a functional signaling domain of a protein selected from the group consisting of CD3 zeta, CD3 gamma, CD3 delta, CD3 epsilon, common FcR gamma (FCER1G), FcR beta (Fc Epsilon R1b), CD79a, CD79b, Fcgamma RIIa, DAP10, and DAP12.

[0062] In one embodiment, the isolated nucleic acid encodes a primary signaling domain comprising a functional signaling domain of CD3 zeta. The encoded CD3 zeta primary signaling domain can comprise an amino acid sequence having at least one, two or three modifications but not more than 20, 10 or 5 modifications of an amino acid sequence of SEQ ID NO: 18 or SEQ ID NO: 20, or a sequence with at least 95-99% identity to an amino acid sequence of SEQ ID NO:18 or SEQ ID NO: 20. In some embodiments, the encoded primary signaling domain comprises a sequence of SEQ ID NO:18 or SEQ ID NO: 20. In other embodiments, the nucleic acid sequence encoding the primary signaling domain comprises a sequence of SEQ ID NO:19 or SEQ ID NO: 21, or a sequence with at least 95-99% identity thereof.

[0063] In some embodiments, the intracellular signaling domain of the isolated nucleic acid molecule encoding the anti-target CAR polypeptide molecule comprises a costimulatory signaling domain. In some embodiments, the encoded costimulatory signaling domain comprises a functional signaling domain of a protein e.g., as described herein, e.g., selected from the group consisting of a MHC class I molecule, a TNF receptor protein, an Immunoglobulin-like protein, a cytokine receptor, an integrin, a signaling lymphocytic activation molecule (SLAM protein), an activating NK cell receptor, BTLA, a Toll ligand receptor, OX40, CD2, CD7, CD27, CD28, CD30, CD40, CDS, ICAM-1, LFA-1 (CD11a/CD18), 4-1BB (CD137), B7-H3, CDS, ICAM-1, ICOS (CD278), GITR, BAFFR, LIGHT, HVEM (LIGHTR), KIRDS2, SLAMF7, NKp80 (KLRF1), NKp44, NKp30, NKp46, CD19, CD4, CD8alpha, CD8beta, IL2R beta, IL2R gamma, IL7R alpha, ITGA4, VLA1, CD49a, ITGA4, IA4, CD49D, ITGA6, VLA-6, CD49f, ITGAD, CD11d, ITGAE, CD103, ITGAL, CD11a, LFA-1, ITGAM, CD11b, ITGAX, CD11c, ITGB1, CD29, ITGB2, CD18, LFA-1, ITGB7, NKG2D, NKG2C, TNFR2, TRANCE/RANKL, DNAMI (CD226), SLAMF4 (CD244, 2B4), CD84, CD96 (Tactile), CEACAMI, CRTAM, Ly9 (CD229), CD160 (BY55), PSGL1, CD100 (SEMA4D), CD69, SLAMF6 (NTB-A, Ly108), SLAM (SLAMF1, CD150, IPO-3), BLAME (SLAMF8), SELPLG (CD162), LTBR, LAT, GADS, SLP-76, PAG/Cbp, CD19a, and a ligand that specifically binds with CD83.

[0064] In one embodiment, the encoded costimulatory domain of 4-1BB comprises the amino acid sequence of SEQ ID NO: 14. In one embodiment, the encoded costimulatory domain comprises an amino acid sequence having at least one, two or three modifications but not more than 20, 10 or 5 modifications of an amino acid sequence of SEQ ID NO: 14, or a sequence with at least 95-99% identify to the amino acid sequence of SEQ ID NO: 14. In one embodiment, the nucleic acid sequence encoding the costimulatory domain comprises the nucleotide sequence of SEQ ID NO: 15, or a sequence at least 95-99% identity to SEQ ID NO: 15.

[0065] In certain embodiments, the encoded transmembrane domain comprises an amino acid sequence of a CD8 transmembrane domain having at least one, two or three modifications but not more than 20, 10 or 5 modifications of an amino acid sequence of SEQ ID NO: 12, or a sequence with at least 95-99% identity to an amino acid sequence of SEQ ID NO: 12. In some embodiments, the encoded transmembrane domain comprises a transmembrane domain of CD8, e.g., IYIWAPLAGTCGVLLLSLVITLYC (SEQ ID NO: 12). In other embodiments, the nucleic acid molecule comprises a nucleotide sequence of a CD8 transmembrane domain, e.g., comprising the sequence of SEQ ID NO: 13, or a sequence with at least 95-99% identity thereof.

[0066] In certain embodiments, the encoded ligand that binds to a target CAR is connected to the transmembrane domain by a hinge region. In one embodiment, the encoded hinge region comprises the amino acid sequence of a CD8 hinge, e.g., SEQ ID NO: 403; or the amino acid sequence of an IgG4 hinge, e.g., SEQ ID NO: 405, or a sequence with at least 95-99% identity to SEQ ID NO:403 or 405. In other embodiments, the nucleic acid sequence encoding the hinge region comprises a sequence of SEQ ID NO: 404 or SEQ ID NO: 406, corresponding to a CD8 hinge or an IgG4 hinge, respectively, or a sequence with at least 95-99% identity to SEQ ID NO:404 or 406.

[0067] In certain embodiments, the anti-target CAR comprises a leader region, wherein said leader region encodes an amino acid sequence comprising SEQ ID NO: 401, or a sequence with at least 95-99% identity thereof; or said leader region comprises the nucleotide sequence of SEQ ID NO: 402, or a nucleotide sequence with at least 95-99% identity thereof.

### Vectors

[0068] In another aspect, the invention pertains to a vector comprising a nucleic acid sequence encoding an anti-target CAR polypeptide described herein. In one embodiment, the vector is chosen from a DNA vector, an RNA vector, a plasmid, a lentivirus vector, adenoviral vector, or a retrovirus vector. In one embodiment, the vector is a lentivirus vector.

[0069] In an embodiment, the vector comprises a nucleic acid sequence that encodes an anti-target CAR, e.g., an anti-target CAR described herein, and a nucleic acid sequence that encodes an inhibitory molecule comprising: an inhKIR cytoplasmic domain; a transmembrane domain, e.g., a KIR transmembrane domain; and an inhibitor cytoplasmic domain, e.g., an ITIM domain, e.g., an inhKIR ITIM domain. In an embodiment the inhibitory molecule is a naturally occurring inhKIR, or a sequence sharing at least 50, 60, 70, 80, 85, 90, 95, or 99% homology with, or that differs by no more than 1, 2, 3, 4, 5, 6, 7, 8, 9, 10, 15, or 20 residues from, a naturally occurring inhKIR.

[0070] In an embodiment, the nucleic acid sequence that encodes an inhibitory molecule comprises: a SLAM family cytoplasmic domain; a transmembrane domain, e.g., a SLAM family transmembrane domain; and an inhibitor cytoplasmic domain, e.g., a SLAM family domain, e.g., an SLAM family ITIM domain. In an embodiment the inhibitory molecule is a naturally occurring SLAM family member, or a sequence sharing at least 50, 60, 70, 80, 85, 90, 95, or 99% homology with, or that differs by no more than 1, 2, 3, 4, 5, 6, 7, 8, 9, 10, 15, or 20 residues from, a naturally occurring SLAM family member.

[0071] In one embodiment, the vector further comprises a promoter. In some embodiments, the promoter is chosen from an EF-1 promoter, a CMV IE gene promoter, an EF-1a promoter, an ubiquitin C promoter, or a phosphoglycerate kinase (PGK) promoter. In one embodiment, the promoter is an EF-1 promoter. In one embodiment, the EF-1 promoter comprises a sequence of SEQ ID NO: 400.

[0072] In one embodiment, the vector is an in vitro transcribed vector, e.g., a vector that transcribes RNA of a nucleic acid molecule described herein. In one embodiment, the nucleic acid sequence in the vector further comprises a poly (A) tail, e.g., a poly A tail described herein, e.g., comprising about 150 adenosine bases (SEQ ID NO:33). In one embodiment, the nucleic acid sequence in the vector further comprises a 3′UTR, e.g., a 3′ UTR described herein, e.g., comprising at least one repeat of a 3′UTR derived from human beta-globulin. In one embodiment, the nucleic acid sequence in the vector further comprises promoter, e.g., a T2A promoter.

### Anti-Target CAR Polypeptides

[0073] In another aspect, the invention features an anti-target CAR molecule comprising: i) a ligand that binds to a target CAR, ii) a transmembrane domain, and iii) an intracellular domain that comprises a costimulatory domain

[0074] In some embodiments, the anti-target CAR molecule comprises a primary signaling domain. In other embodiments, the primary signaling domain of the anti-target CAR polypeptide molecule comprises a functional signaling domain of a protein selected from the group consisting of CD3 zeta, CD3 gamma, CD3 delta, CD3 epsilon, common FcR gamma (FCER1G), FcR beta (Fc Epsilon R1b), CD79a, CD79b, Fcgamma RIIa, DAP10, and DAP12.

[0075] In one embodiment, the primary signaling domain comprises a functional signaling domain of CD3 zeta. The CD3 zeta primary signaling domain can comprise an amino acid sequence having at least one, two or three modifications but not more than 20, 10 or 5 modifications of an amino acid sequence of SEQ ID NO: 18 or SEQ ID NO: 20, or a sequence with at least 95-99% identity to an amino acid sequence of SEQ ID NO:18 or SEQ ID NO: 20. In some embodiments, the primary signaling domain of the CAR polypeptide molecule comprises a sequence of SEQ ID NO:18 or SEQ ID NO: 20.

[0076] In some embodiments, the intracellular signaling domain of the anti-target CAR polypeptide molecule comprises a costimulatory signaling domain. In some embodiments, the costimulatory signaling domain comprises a functional signaling domain of a protein e.g., as described herein, e.g., selected from the group consisting of a MHC class I molecule, a TNF receptor protein, an Immunoglobulin-like protein, a cytokine receptor, an integrin, a signaling lymphocytic activation molecule (SLAM protein), an activating NK cell receptor, BTLA, a Toll ligand receptor, OX40, CD2, CD7, CD27, CD28, CD30, CD40, CDS, ICAM-1, LFA-1 (CD11a/CD18), 4-1BB (CD137), B7-H3, CDS, ICAM-1, ICOS (CD278), GITR, BAFFR, LIGHT, HVEM (LIGHTR), KIRDS2, SLAMF7, NKp80 (KLRF1), NKp44, NKp30, NKp46, CD19, CD4, CD8alpha, CD8beta, IL2R beta, IL2R gamma, IL7R alpha, ITGA4, VLA1, CD49a, ITGA4, IA4, CD49D, ITGA6, VLA-6, CD49f, ITGAD, CD11d, ITGAE, CD103, ITGAL, CD11a, LFA-1, ITGAM, CD11b, ITGAX, CD11c, ITGB1, CD29, ITGB2, CD18, LFA-1, ITGB7, NKG2D, NKG2C, TNFR2, TRANCE/RANKL, DNAMI (CD226), SLAMF4 (CD244, 2B4), CD84, CD96 (Tactile), CEACAMI, CRTAM, Ly9 (CD229), CD160 (BY55), PSGL1, CD100 (SEMA4D), CD69, SLAMF6 (NTB-A, Ly108), SLAM (SLAMF1, CD150, IPO-3), BLAME (SLAMF8), SELPLG (CD162), LTBR, LAT, GADS, SLP-76, PAG/Cbp, CD19a, and a ligand that specifically binds with CD83.

[0077] In some embodiments, the ligand comprises a cognate antigen molecule or an antibody molecule that binds to the target CAR. In some embodiments, the ligand comprises an antibody molecule that binds to the target CAR, e.g., an anti-idiotypic antibody molecule that binds the target CAR, e.g., an anti-idiotype antibody molecule described herein.

[0078] In some embodiments, the ligand of the anti-target CAR polypeptide molecule comprises an antibody, an antibody fragment, an scFv, a Fv, a Fab, a (Fab′) 2, a single domain antibody (SDAB), a VH or VL domain, or a camelid VHH domain.

[0079] In some embodiments, the ligand of the anti-target CAR polypeptide molecule comprises a transmembrane domain of a protein chosen from an alpha, beta or zeta chain of a T-cell receptor, CD28, CD3 epsilon, CD45, CD4, CD5, CD8, CD9, CD16, CD22, CD33, CD37, CD64, CD80, CD86, CD134, CD137, CD154, KIRDS2, OX40, CD2, CD27, LFA-1 (CD11a, CD18), ICOS (CD278), 4-1BB (CD137), GITR, CD40, BAFFR, HVEM (LIGHTR), SLAMF7, NKp80 (KLRF1), CD160, CD19, IL2R beta, IL2R gamma, IL7R a, ITGA1, VLA1, CD49a, ITGA4, IA4, CD49D, ITGA6, VLA-6, CD49f, ITGAD, CD11d, ITGAE, CD103, ITGAL, CD11a, LFA-1, ITGAM, CD11b, ITGAX, CD11c, ITGB1, CD29, ITGB2, CD18, LFA-1, ITGB7, TNFR2, DNAMI (CD226), SLAMF4 (CD244, 2B4), CD84, CD96 (Tactile), CEACAMI, CRTAM, Ly9 (CD229), CD160 (BY55), PSGL1, CD100 (SEMA4D), SLAMF6 (NTB-A, Ly108), SLAM (SLAMF1, CD150, IPO-3), BLAME (SLAMF8), SELPLG (CD162), LTBR, PAG/Cbp, NKp44, NKp30, NKp46, NKG2D, and/or NKG2C.

[0080] In some embodiments, the ligand of the anti-target CAR polypeptide molecule is connected to the transmembrane domain by a hinge region. In one embodiment, the encoded hinge region comprises the amino acid sequence of a CD8 hinge, e.g., SEQ ID NO: 403, or the amino acid sequence of an IgG4 hinge, e.g., SEQ ID NO: 405, or a sequence with at least 95-99% identity thereof.

[0081] In some embodiments, the anti-target CAR polypeptide molecule further comprises a leader sequence. In one embodiment, the leader sequence comprises the sequence of SEQ ID NO: 1, or an amino acid sequence with at least 95-99% identity to SEQ ID NO 401.

### Anti-Target CAR-Expressing Cells

[0082] In another aspect, the invention pertains to a cell, e.g., an immune effector cell, (e.g., a population of cells, e.g., a population of immune effector cells) comprising a nucleic acid molecule, an anti-target CAR polypeptide molecule, or a vector as described herein.

[0083] In one embodiment, the cell is a human T cell. In one embodiment, the cell is a cell described herein, e.g., a human T cell, e.g., a human T cell described herein; or a human NK cell, e.g., a human NK cell described herein. In one embodiment, the human T cell is a CD8+ T cell. In one embodiment, the cell is a T cell and the T cell is diacylglycerol kinase (DGK) deficient. In one embodiment, the cell is a T cell and the T cell is Ikaros deficient. In one embodiment, the cell is a T cell and the T cell is both DGK and Ikaros deficient.

[0084] In an embodiment, the cell comprising a nucleic acid molecule, an anti-target CAR polypeptide molecule, or a vector as described herein is a cell that has not been previously engineered to express a target CAR, e.g., a target CAR described herein.

[0085] In another embodiment, an anti-target CAR-expressing immune effector cell described herein can further express another agent, e.g., an agent which enhances the activity of an anti-target CAR-expressing cell. For example, in one embodiment, the agent can be an agent which inhibits an inhibitory molecule. Examples of inhibitory molecules include PD-1, PD-L1, CTLA-4, TIM-3, CEACAM (e.g., CEACAM-1, CEACAM-3 and/or CEACAM-5), LAG-3, VISTA, BTLA, TIGIT, LAIR1, CD160, 2B4 and TGF beta, e.g., as described herein. In one embodiment, the agent that inhibits an inhibitory molecule comprises a first polypeptide, e.g., an inhibitory molecule, associated with a second polypeptide that provides a positive signal to the cell, e.g., an intracellular signaling domain described herein. In one embodiment, the agent comprises a first polypeptide, e.g., of an inhibitory molecule such as PD-1, PD-L1, CTLA-4, TIM-3, CEACAM (e.g., CEACAM-1, CEACAM-3 and/or CEACAM-5), LAG-3, VISTA, BTLA, TIGIT, LAIR1, CD160, 2B4 or TGF beta, or a fragment of any of these, and a second polypeptide which is an intracellular signaling domain described herein (e.g., comprising a costimulatory domain (e.g., 41BB, CD27 or CD28, e.g., as described herein) and/or a primary signaling domain (e.g., a CD3 zeta signaling domain described herein). In one embodiment, the agent comprises a first polypeptide of PD-1 or a fragment thereof, and a second polypeptide of an intracellular signaling domain described herein (e.g., a CD28, CD27, OX40 or 4-IBB signaling domain described herein and/or a CD3 zeta signaling domain described herein).

### Methods of Manufacturing CAR-Expressing Cells

[0086] In some aspects, the disclosure provides a method of making (e.g., manufacturing) a population of Chimeric Antigen Receptor (CAR)-expressing immune effector cells, comprising:
[0087] a) providing a population of cells comprising immune effector cells and cancer cells;
[0088] b) contacting the population of immune effector cells with a nucleic acid encoding a CAR polypeptide;
[0089] c) reducing the number or proportion of cancer cells in the population, wherein the reducing comprises one or more of:
   [0090] i) contacting the population of cells with a reagent (e.g., antibody molecule) that binds a T cell antigen other than CD3 or CD28, e.g., binds CD4 or CD8, and collecting cells that bind the reagent;
   [0091] ii) contacting the population of cells with a reagent (e.g., antibody molecule) that binds a tumor antigen other than CD19, e.g., binds CD20, CD22, ROR1, CD10, CD34, CD123, FLT-3, CD79b, CD179b, or CD79a and collecting cells that do not bind the reagent; or
   [0092] iii) contacting the population of cells with a therapeutic that preferentially reduces the number of (e.g., kills or inhibits proliferation of) cancer cells compared to noncancerous immune effector cells, wherein the therapeutic is other than a BTK inhibitor, e.g., other than ibrutinib, e.g., wherein the therapeutic comprises an antibody molecule or an antibody drug conjugate;
[0093] thereby making an enriched population of CAR-expressing immune effector cells.

[0094] In some embodiments, (b) is performed before (c), (c) is performed before (b), or (b) and (c) are performed simultaneously.

[0095] In some embodiments, the cancer cells are hematologic cancer cells or circulating tumor cells (e.g., circulating tumor cells from a solid tumor).

[0096] In some embodiments, contacting comprises contacting the population of cells with a reagent (e.g., antibody molecule) that binds a tumor antigen other than CD19, CD30, CD38, CD123, CD20, CD14 or CD11b, e.g., comprises contacting the population of cells with a reagent (e.g., antibody molecule) that binds CD22, ROR1, CD10, CD34, FLT-3, CD79b, CD179b, or CD79a.

[0097] In some embodiments, the cancer cells comprise cancer cells that lack the antigen bound by the CAR, e.g., CD19-negative cancer cells. In some embodiments, the cancer cells that lack the antigen bound by the CAR comprise a portion of the protein that, in wild-type cells, comprises the antigen. In some embodiments, the protein comprises a truncation, deletion, or frameshift mutation that removes or mutates the antigen.

[0098] In some embodiments, the reagent (e.g., antibody molecule) of (c) (i) or (c) (ii) is bound to a solid substrate, e.g., a column or a bead, e.g., a magnetic bead or a bead suitable for optical sorting. In some embodiments, (c) (i) or (c) (ii) comprises performing MACS or FACS. In some embodiments, the therapeutic of (c) (iii) comprises an antibody molecule or an antibody drug conjugate. In some embodiments, the antibody molecule is an antiCD20 or antiCD22 antibody molecule. In some embodiments, the antibody molecule is fused to a toxin, e.g., an exotoxin A. In some embodiments, the therapeutic of (c) (iii) is bound to a solid substrate.

[0099] In some embodiments, the method further comprises determining the number or proportion of unwanted cells (e.g., cancer cells, e.g., cancer cells that lack the antigen bound by the CAR, e.g., CD19 negative cancer cells) in the population of cells. In some embodiments, the determining comprises performing a nucleic acid detection method, e.g., PCR, e.g., quantitative PCR, to determine the level or proportion of cancer cells in the sample, e.g., Acute Lymphocytic Leukemia (ALL) cells. In some embodiments, the determining comprises performing a deep sequencing method, e.g., DNA sequencing or RNA sequencing, e.g., nested PCR amplification and sequencing, e.g., sequencing of a tumor antigen (e.g., CD19) locus and optionally classifying the tumor antigen locus as having a mutation (e.g., deletion). In embodiments, the determining comprises performing one or more of extension assay (e.g., Wequenom), targeted PCR, digital PCR, and next generation sequencing (NGS). In embodiments, the determining comprises contacting cells with a reagent that detects a tumor antigen (e.g., wherein the tumor antigen is CD19 and the reagent comprises an anti-CD19 antibody). In embodiments, the determining comprises contacting cells with a reagent that detects a cancer cell, e.g., a reagent that detects highly proliferative cells, e.g., an antibody detecting Ki-67.

[0100] The present disclosure also provides, in some aspects, a method of making (e.g., manufacturing) a population of CAR (chimeric antigen receptor) expressing cells, comprising:
[0101] (a) providing a population of cells, wherein the population comprises immune effector cells;
[0102] (b) determining the number or proportion of unwanted cells (e.g., cancer cells, e.g., cancer cells that lack the antigen bound by the CAR, e.g., CD19 negative cancer cells) in the population,
[0103] (c) (i) if the number or proportion of (b) is less than a reference value, e.g., wherein the reference value is 10%, 5%, 4%, 3%, 2%, 1%, 0.1%, 0.01%, or 0.001% of the population, then contacting the population of cells with a nucleic acid, e.g., DNA or RNA, encoding a CAR, e.g., a CAR described herein and maintaining (e.g., culturing or expanding) the population of cells under conditions that allow expression of the CAR polypeptide from the nucleic acid, thereby making a population of CAR-expressing cells, or
[0104] (c) (ii) if the number or proportion of (b) is greater than the reference value, then discarding the population of cells or reducing the number or proportion of unwanted cells in the population.

[0105] The present disclosure also provides, in some aspects, a method of classifying a population of cells as more suitable or less suitable for CAR manufacturing, comprising:
[0106] (a) providing a population of cells, wherein the population comprises immune effector cells;
[0107] (b) determining the number or proportion of unwanted cells (e.g., cancer cells, e.g., cancer cells that lack the antigen bound by the CAR, e.g., CD19 negative cancer cells) in the population,
[0108] (c) if the number or proportion of (b) is greater than a reference value, then classifying the cells as less suitable (e.g., not suitable) for CAR manufacturing, or if the number or proportion of (b) is less than the reference value, then classifying the cells as more suitable for CAR manufacturing.

[0109] In some embodiments, if the cells are classified as more suitable for CAR manufacturing, the method further comprises contacting the cells with a nucleic acid, e.g., DNA or RNA, encoding a CAR, e.g., a CAR described herein. In some embodiments, the method further comprises maintaining (e.g., culturing or expanding) the cells under conditions that allow expression of the CAR polypeptide from the nucleic acid, thereby making a CAR-expressing cell. In embodiments, the method further comprises administering the CAR-expressing cell to a subject in need thereof.

[0110] In some embodiments, the cancer cells that lack the antigen bound by the CAR comprise a portion of the protein that, in wild-type cells, comprises the antigen. In some embodiments, the protein comprises a truncation, deletion, or frameshift mutation that removes or mutates the antigen. In some embodiments, the cancer cells are CD19-negative cancer cells.

[0111] In some embodiments, (b) comprises performing a nucleic acid detection method, e.g., PCR, e.g., quantitative PCR, to determine the level or proportion of cancer cells in the sample, e.g., Acute Lymphocytic Leukemia (ALL) cells. In some embodiments, (b) comprises performing a deep sequencing method, e.g., DNA sequencing or RNA sequencing, e.g., nested PCR amplification and sequencing, e.g., sequencing of a tumor antigen (e.g., CD19) locus and optionally classifying the tumor antigen locus as having a mutation (e.g., deletion). In embodiments, (b) comprises performing one or more of extension assay (e.g., Wequenom), targeted PCR, digital PCR, and next generation sequencing (NGS). In embodiments, (b) comprises contacting cells with a reagent that detects a tumor antigen (e.g., wherein the tumor antigen is CD19 and the reagent comprises an anti-CD19 antibody). In embodiments, (b) comprises contacting cells with a reagent that detects a cancer cell, e.g., a reagent that detects highly proliferative cells, e.g., an antibody detecting Ki-67.

[0112] In some embodiments, the method further comprises reducing the number or proportion of cancer cells in the population, wherein the reducing comprises one or more of:
[0113] i) contacting the population of cells with a reagent (e.g., antibody molecule) that binds a T cell antigen other than CD3 or CD28, e.g., binds CD4 or CD8, and collecting cells that bind the reagent;
[0114] ii) contacting the population of cells with a reagent (e.g., antibody molecule) that binds a tumor antigen other than CD19, e.g., binds CD20, CD22, ROR1, CD10, CD34, CD123, FLT-3, CD79b, CD179b, or CD79a and collecting cells that do not bind the reagent; or
[0115] iii) contacting the population of cells with a therapeutic that preferentially reduces the number of (e.g., kills or inhibits proliferation of) cancer cells compared to noncancerous immune effector cells, wherein the therapeutic is other than a BTK inhibitor, e.g., other than ibrutinib, e.g., wherein the therapeutic comprises an antibody molecule or an antibody drug conjugate.
   Methods of Treating a Patient and/or Selecting a Patient for Treatment with CAR-Expressing Cells

[0116] The present disclosure provides, in some aspects, a method of treating a subject having a cancer, comprising:
[0117] (a) providing a population of cells from the subject, wherein the population comprises cancer cells;
[0118] (b) determining the number or proportion of cells (e.g., of total cells or of cancer cells) in the population that lack a first tumor antigen (e.g., CD19) or a gene encoding the first tumor antigen, wherein the first tumor antigen is bound by a plurality of CAR-expressing cells,
[0119] (c) (i) if the number or proportion of (b) is less than a reference value, then administering the plurality of CAR-expressing cells to the subject, or
[0120] (c) (ii) if the number or proportion of (b) is greater than the reference value, than administering to the subject an anti-cancer therapy other than therapy with the plurality of CAR-expressing cells.

[0121] The present disclosure also provides, in some aspects, a method of selecting a subject having a cancer for therapy with a plurality of CAR-expressing cells, comprising:
[0122] (a) providing a population of cells from the subject, wherein the population comprises cancer cells;
[0123] (b) determining the number or proportion of total cells or of cancer cells in the population that lack a first tumor antigen (e.g., CD19) or a gene encoding the first tumor antigen, wherein the CAR-expressing cells bind the first tumor antigen,
[0124] (c) (i) if the number or proportion of (b) is less than a reference value, then selecting the subject for therapy with the plurality of CAR-expressing cells, or
[0125] (c) (ii) if the number or proportion of (b) is greater than the reference value, than selecting the subject for an anti-cancer therapy other than therapy with the plurality of CAR-expressing cells.

[0126] In some embodiments, the anti-cancer therapy other than therapy with the plurality of CAR-expressing cells comprises chemotherapy, surgery, radiation, or therapy with a different plurality of CAR-expressing cells that binds a second tumor antigen.

[0127] In some embodiments, the plurality of CAR-expressing cells is a plurality of CD19 CAR expressing cells, e.g., cells expressing a CD19 CAR of Table 3. In some embodiments, the plurality of CAR-expressing cells is a plurality of BCMA CAR expressing cells, e.g., cells expressing a BCMA CAR of Table 5 or Table 6.

[0128] In some embodiments, the cancer is ALL. In some embodiments, the cancer cell is a hematologic cancer cell or a circulating tumor cell (e.g., a circulating tumor cell from a solid tumor).

[0129] In some embodiments, (b) comprises performing a nucleic acid detection method, e.g., PCR, e.g., quantitative PCR, to determine the level or proportion of cancer cells in the sample, e.g., ALL cells. In some embodiments, (b) comprises performing a deep sequencing method, e.g., DNA sequencing or RNA sequencing, e.g., embedded PCR amplification and sequencing, e.g., sequencing of the tumor antigen (e.g., CD19) locus and optionally classifying the tumor antigen locus as having a mutation (e.g., deletion).

### Methods of Treatment

[0130] In another aspect, the present invention provides a method comprising administering to a subject (e.g., a subject who has experienced relapse from a prior administration of a target CAR therapy), an anti-target CAR molecule, e.g., as described herein, or a cell comprising one or more nucleic acids encoding an anti-target CAR molecule, e.g., as described herein. In one embodiment, the subject has a disease associated with expression of a target CAR (e.g., a disease in which a target CAR is expressed). In one embodiment, the subject is a human.

[0131] In another aspect, the invention pertains to a method of treating a subject (e.g., a subject who has experienced relapse from a prior administration of a target CAR therapy), having a disease associated with expression of a target CAR (e.g., a disease in which a target CAR is expressed) comprising administering to the subject an effective amount of a cell comprising an anti-target CAR molecule, e.g., as described herein.

[0132] In yet another aspect, the invention features a method of treating a subject (e.g., a subject who has experienced relapse from a prior administration of a target CAR therapy), having a disease associated with expression of a target CAR (e.g., a disease in which a target CAR is expressed), comprising administering to the subject an effective amount of a cell, e.g., an immune effector cell (e.g., a population of immune effector cells) comprising an anti-target CAR molecule, wherein the anti-target CAR molecule a ligand that binds a target CAR, a transmembrane domain, and an intracellular domain, said intracellular domain comprises a costimulatory domain and/or a primary signaling domain, wherein said ligand binds to the target CAR associated with the disease.

[0133] In a related aspect, the invention features a method of treating a subject (e.g., a subject who has experienced relapse from a prior administration of a target CAR therapy), having a disease associated with expression of a target CAR (e.g., a disease in which a target CAR is expressed). The method comprises administering to the subject an effective amount of a cell, e.g., an immune effector cell (e.g., a population of immune effector cells) comprising an anti-target CAR molecule, in combination with an agent that increases the efficacy of the immune cell, wherein:
[0134] the anti-target CAR molecule comprises ligand that binds to a target CAR, a transmembrane domain, and an intracellular domain comprising a costimulatory domain and/or a primary signaling domain, wherein said ligand binds to the target CAR, e.g., binds an extracellular domain of the target CAR; and
[0135] the agent that increases the efficacy of the immune cell is chosen from one or more of:
[0136] a protein phosphatase inhibitor;
[0137] a kinase inhibitor;
[0138] a cytokine;
[0139] an inhibitor of an immune inhibitory molecule; or
[0140] an agent that decreases the level or activity of a TREG cell.

[0141] In a related aspect, the invention features a method of treating a subject (e.g., a subject who has experienced relapse from a prior administration of a target CAR therapy), having a disease associated with expression of a target CAR (e.g., a disease in which a target CAR is expressed), comprising administering to the subject an effective amount of a cell, e.g., an immune effector cell (e.g., a population of immune effector cells) comprising an anti-target CAR molecule, wherein:
[0142] the anti-target CAR molecule comprises a ligand that binds to a target CAR, a transmembrane domain, and an intracellular domain comprising a costimulatory domain and/or a primary signaling domain, wherein said ligand binds to the target CAR, e.g., binds an extracellular domain of the target CAR; and
[0143] the ligand of the anti-target CAR molecule comprises an antibody molecule and has a binding affinity at least 5-fold less than the antibody from which the ligand is derived.

[0144] In another aspect, the invention features a composition comprising an immune effector cell (e.g., a population of immune effector cells) comprising an anti-target CAR molecule, e.g., as described herein for use in the treatment of a subject having disease associated with expression of a target CAR (e.g., a disease in which a target CAR is expressed).

[0145] In certain embodiments of any of the aforesaid methods or uses the disease associated with expression of a target CAR, is selected from a proliferative disease such as a cancer or malignancy or a precancerous condition such as a myelodysplasia, a myelodysplastic syndrome or a preleukemia, or is a non-cancer related indication associated with expression of a tumor antigen described herein. In one embodiment, the disease is a cancer described herein, e.g., a cancer described herein as being associated with a target CAR. In one embodiment, the disease is a hematologic cancer. In one embodiment, the hematologic cancer is leukemia. In one embodiment, the cancer is selected from the group consisting of one or more acute leukemias including but not limited to B-cell acute lymphoid leukemia (“BALL”), T-cell acute lymphoid leukemia (“TALL”), acute lymphoid leukemia (ALL); one or more chronic leukemias including but not limited to chronic myelogenous leukemia (CML), chronic lymphocytic leukemia (CLL); additional hematologic cancers or hematologic conditions including, but not limited to B cell prolymphocytic leukemia, blastic plasmacytoid dendritic cell neoplasm, Burkitt's lymphoma, diffuse large B cell lymphoma, follicular lymphoma, hairy cell leukemia, small cell- or a large cell-follicular lymphoma, malignant lymphoproliferative conditions, MALT lymphoma, mantle cell lymphoma, Marginal zone lymphoma, multiple myeloma, myelodysplasia and myelodysplastic syndrome, non-Hodgkin lymphoma, Hodgkin lymphoma, plasmablastic lymphoma, plasmacytoid dendritic cell neoplasm, Waldenstrom macroglobulinemia, and “preleukemia” which are a diverse collection of hematological conditions united by ineffective production (or dysplasia) of myeloid blood cells, and to disease associated with expression of a target CAR described herein include, but not limited to, atypical and/or non-classical cancers, malignancies, precancerous conditions or proliferative diseases expressing a target CAR as described herein; and any combination thereof. In another embodiment, the disease associated with expression of a target CAR described herein is a solid tumor.

[0146] In certain embodiments of any of the aforesaid methods or uses, the disease associated with a target CAR is a disease in which any one, or more of the following tumor antigens were expressed at an earlier time point, e.g., during initial diagnosis or prior to administration of target CAR, but are altered (e.g., present at a lower level) or absent in at least a sub-population of cells when the anti-target CAR is administered: CD19, CD123, CD22, CD30, CD171, CS-1, CLL-1 (CLECL1), CD33, EGFRVIII, GD2, GD3, BCMA, Tn Ag, PSMA, ROR1, FLT3, TAG72, CD38, CD44v6, CEA, EPCAM, B7H3, KIT, IL-13Ra2, Mesothelin, IL-11Ra, PSCA, PRSS21, VEGFR2, LewisY, CD24, PDGFR-beta, SSEA-4, CD20, Folate receptor alpha, ERBB2 (Her2/neu), MUC1, EGFR, NCAM, Prostase, PAP, ELF2M, Ephrin B2, FAP, IGF-I receptor, CAIX, LMP2, gp100, bcr-abl, tyrosinase, EphA2, Fucosyl GM1, sLe, GM3, TGS5, HMWMAA, o-acetyl-GD2, Folate receptor beta, TEM1/CD248, TEM7R, CLDN6, TSHR, GPRC5D, CXORF61, CD97, CD179a, ALK, Polysialic acid, PLAC1, GloboH, NY-BR-1, UPK2, HAVCR1, ADRB3, PANX3, GPR20, LY6K, OR51E2, TARP, WT1, NY-ESO-1, LAGE-1a, MAGE-A1, MAGE A1, ETV6-AML, sperm protein 17, XAGE1, Tie 2, MAD-CT-1, MAD-CT-2, Fos-related antigen 1, p53, p53 mutant, prostein, survivin and telomerase, PCTA-1/Galectin 8, MelanA/MART1, Ras mutant, hTERT, sarcoma translocation breakpoints, ML-IAP, ERG (TMPRSS2 ETS fusion gene), NA17, PAX3, Androgen receptor, Cyclin B1, MYCN, RhoC, TRP-2, CYP1B1, BORIS, SART3, PAX5, OY-TES1, LCK, AKAP-4, SSX2, RAGE-1, human telomerase reverse transcriptase, RU1, RU2, legumain, HPV E6, E7, intestinal carboxyl esterase, mut hsp70-2, CD79a, CD79b, CD72, LAIR1, FCAR, LILRA2, CD300LF, CLEC12A, BST2, EMR2, LY75, GPC3, FCRL5, and IGLL1.

[0147] In other embodiments of any of the aforesaid methods or uses, the disease associated with a target CAR is a disease in which any one, or more of the following tumor antigens were expressed at an earlier time point, e.g., during initial diagnosis or prior to administration of target CAR, but are altered (e.g., present at a lower level) or absent in at least a sub-population of cells when the anti-target CAR is administered: TSHR, TSHR, CD171, CS-1, CLL-1, GD3, Tn Ag, FLT3, CD38, CD44v6, B7H3, KIT, IL-13Ra2, IL-11Ra, PSCA, PRSS21, VEGFR2, LewisY, CD24, PDGFR-beta, SSEA-4, MUC1, EGFR, NCAM, CAIX, LMP2, EphA2, Fucosyl GM1, sLe, GM3, TGS5, HMWMAA, o-acetyl-GD2, Folate receptor beta, TEM1/CD248, TEM7R, CLDN6, GPRC5D, CXORF61, CD97, CD179a, ALK, Polysialic acid, PLAC1, GloboH, NY-BR-1, UPK2, HAVCR1, ADRB3, PANX3, GPR20, LY6K, OR51E2, TARP, WT1, ETV6-AML, sperm protein 17, XAGE1, Tie 2, MAD-CT-1, MAD-CT-2, Fos-related antigen 1, p53 mutant, hTERT, sarcoma translocation breakpoints, ML-IAP, ERG (TMPRSS2 ETS fusion gene), NA17, PAX3, Androgen receptor, Cyclin B1, MYCN, RhoC, CYP1B1, BORIS, SART3, PAX5, OY-TES1, LCK, AKAP-4, SSX2, CD79a, CD79b, CD72, LAIR1, FCAR, LILRA2, CD300LF, CLEC12A, BST2, EMR2, LY75, GPC3, FCRL5, and IGLL1.

[0148] In other embodiments of any of the aforesaid methods or uses, the disease associated with a target CAR is a disease in which any one, or more of the following tumor antigens were expressed at an earlier time point, e.g., during initial diagnosis or prior to administration of target CAR, but are altered (e.g., present at a lower level) or absent in at least a sub-population of cells when the anti-target CAR is administered: TSHR, CLDN6, GPRC5D, CXORF61, CD97, CD179a, ALK, Polysialic acid, PLAC1, GloboH, NY-BR-1, UPK2, HAVCR1, ADRB3, PANX3, GPR20, LY6K, OR51E2, CD150, 5T4, ActRIIA, B7, BMCA, CA-125, CCNA1, CD123, CD126, CD138, CD14, CD148, CD15, CD19, CD20, CD200, CD21, CD22, CD23, CD24, CD25, CD26, CD261, CD262, CD30, CD33, CD362, CD37, CD38, CD4, CD40, CD40L, CD44, CD46, CD5, CD52, CD53, CD54, CD56, CD66a-d, CD74, CD8, CD80, CD92, CE7, CS-1, CSPG4, ED-B fibronectin, EGFR, EGFRvIII, EGP-2, EGP-4, EPHa2, ErbB2, ErbB3, ErbB4, FBP, GD2, GD3, HER1-HER2 in combination, HER2-HER3 in combination, HERV—K, HIV-1 envelope glycoprotein gp120, HIV-1 envelope glycoprotein gp41, HLA-DR, HM1.24, HMW-MAA, Her2, Her2/neu, IGF-1R, IL-11Ralpha, IL-13R-alpha2, IL-2, IL-22R-alpha, IL-6, IL-6R, Ia, Ii, L1-CAM, L1-cell adhesion molecule, Lewis Y, LI-CAM, MAGE A3, MAGE-A1, MART-1, MUC1, NKG2C ligands, NKG2D Ligands, NY-ESO-1, OEPHa2, PIGF, PSCA, PSMA, ROR1, T101, TAC, TAG72, TIM-3, TRAIL-R1, TRAIL-R1 (DR4), TRAIL-R2 (DR5), VEGF, VEGFR2, WT-1, a G-protein coupled receptor, alphafetoprotein (AFP), an angiogenesis factor, an exogenous cognate binding molecule (ExoCBM), oncogene product, anti-folate receptor, c-Met, carcinoembryonic antigen (CEA), cyclin (D1), ephrinB2, epithelial tumor antigen, estrogen receptor, fetal acethycholine e receptor, folate binding protein, gp100, hepatitis B surface antigen, kappa chain, kappa light chain, kdr, lambda chain, livin, melanoma-associated antigen, mesothelin, mouse double minute 2 homolog (MDM2), mucin 16 (MUC16), mutated p53, mutated ras, necrosis antigens, oncofetal antigen, ROR2, progesterone receptor, prostate specific antigen, tEGFR, tenascin, β2-Microglobulin, Fc Receptor-like 5 (FcRL5), or molecules expressed by HIV, HCV, HBV, or other pathogens.

[0149] In certain embodiments, the methods or uses are carried out in combination with an agent that increases the efficacy of the immune effector cell, e.g., an agent as described herein.

[0150] In any of the aforesaid methods or uses, the disease associated with expression of a target CAR (e.g., a disease in which a target CAR is expressed) is selected from the group consisting of a proliferative disease, a precancerous condition, a cancer, and a non-cancer related indication, e.g., B cell aplasia, associated with expression of the target CAR. In an embodiment, the non-cancer indication is B cell aplasia.

[0151] The cancer can be a hematologic cancer, e.g., a cancer chosen from one or more of chronic lymphocytic leukemia (CLL), acute leukemias, acute lymphoid leukemia (ALL), B-cell acute lymphoid leukemia (B-ALL), T-cell acute lymphoid leukemia (T-ALL), chronic myelogenous leukemia (CML), B cell prolymphocytic leukemia, blastic plasmacytoid dendritic cell neoplasm, Burkitt's lymphoma, diffuse large B cell lymphoma, follicular lymphoma, hairy cell leukemia, small cell- or a large cell-follicular lymphoma, malignant lymphoproliferative conditions, MALT lymphoma, mantle cell lymphoma, marginal zone lymphoma, multiple myeloma, myelodysplasia and myelodysplastic syndrome, non-Hodgkin's lymphoma, Hodgkin's lymphoma, plasmablastic lymphoma, plasmacytoid dendritic cell neoplasm, Waldenstrom macroglobulinemia, or pre-leukemia.

[0152] The cancer can also be chosen from colon cancer, rectal cancer, renal-cell carcinoma, liver cancer, non-small cell carcinoma of the lung, cancer of the small intestine, cancer of the esophagus, melanoma, bone cancer, pancreatic cancer, skin cancer, cancer of the head or neck, cutaneous or intraocular malignant melanoma, uterine cancer, ovarian cancer, rectal cancer, cancer of the anal region, stomach cancer, testicular cancer, uterine cancer, carcinoma of the fallopian tubes, carcinoma of the endometrium, carcinoma of the cervix, carcinoma of the vagina, carcinoma of the vulva, Hodgkin's Disease, non-Hodgkin's lymphoma, cancer of the endocrine system, cancer of the thyroid gland, cancer of the parathyroid gland, cancer of the adrenal gland, sarcoma of soft tissue, cancer of the urethra, cancer of the penis, solid tumors of childhood, cancer of the bladder, cancer of the kidney or ureter, carcinoma of the renal pelvis, neoplasm of the central nervous system (CNS), primary CNS lymphoma, tumor angiogenesis, spinal axis tumor, brain stem glioma, pituitary adenoma, Kaposi's sarcoma, epidermoid cancer, squamous cell cancer, T-cell lymphoma, environmentally induced cancers, combinations of said cancers, and metastatic lesions of said cancers.

### Methods of Making CAR-Expressing Cells

[0153] In another aspect, the invention pertains to a method of making a cell (e.g., an immune effector cell or population thereof) comprising introducing into (e.g., transducing) a cell, e.g., a T cell or a NK cell described herein, with a vector of comprising a nucleic acid encoding an anti-target CAR, e.g., an anti-target CAR polypeptide, e.g., as described herein; or a nucleic acid encoding an anti-target CAR molecule, e.g., as described herein.

[0154] The cell in the methods is an immune effector cell (e.g., a T cell or a NK cell, or a combination thereof). In some embodiments, the cell in the methods is diacylglycerol kinase (DGK) and/or Ikaros deficient.

[0155] In some embodiment, introducing the nucleic acid molecule encoding an anti-target CAR, e.g., as described herein, comprises transducing a vector comprising the nucleic acid molecule encoding an anti-target CAR, e.g., as described herein, or transfecting the nucleic acid molecule encoding an anti-target CAR, e.g., as described herein, wherein the nucleic acid molecule is an in vitro transcribed RNA.

[0156] In some embodiments, the method further comprises:
[0157] providing a population of immune effector cells (e.g., T cells or NK cells); and
[0158] removing T regulatory cells from the population, thereby providing a population of T regulatory-depleted cells;
[0159] wherein steps a) and b) are performed prior to introducing the nucleic acid encoding the anti-target CAR to the population. In embodiments of the methods, the T regulatory cells comprise CD25+ T cells, and are removed from the cell population using an anti-CD25 antibody, or fragment thereof. The anti-CD25 antibody, or fragment thereof, can be conjugated to a substrate, e.g., a bead.

[0160] In other embodiments, the population of T regulatory-depleted cells provided from step (b) contains less than 30%, 25%, 20%, 15%, 10%, 5%, 4%, 3%, 2%, 1% of CD25+ cells.

[0161] In yet other embodiments, the method further comprises:
[0162] removing cells from the population which express a tumor antigen that does not comprise CD25 to provide a population of T regulatory-depleted and tumor antigen depleted cells prior to introducing the nucleic acid encoding an anti-target CAR to the population. The tumor antigen can be selected from CD19, CD30, CD38, CD123, CD20, CD14 or CD11b, or a combination thereof.

[0163] In other embodiments, the method further comprises removing cells from the population which express a checkpoint inhibitor, to provide a population of T regulatory-depleted and inhibitory molecule depleted cells prior to introducing the nucleic acid encoding an anti-target CAR to the population. The checkpoint inhibitor can be chosen from PD-1, LAG-3, TIM3, B7-H1, CD160, P1H, 2B4, CEACAM (e.g., CEACAM-1, CEACAM-3, and/or CEACAM-5), TIGIT, CTLA-4, BTLA, and LAIR1.

[0164] Further embodiments disclosed herein encompass providing a population of immune effector cells. The population of immune effector cells provided can be selected based upon the expression of one or more of CD3, CD28, CD4, CD8, CD45RA, and/or CD45RO. In certain embodiments, the population of immune effector cells provided are CD3+ and/or CD28+.

[0165] In certain embodiments of the method, the method further comprises expanding the population of cells after the nucleic acid molecule encoding an anti-target CAR has been introduced.

[0166] In embodiments, the population of cells is expanded for a period of 8 days or less.

[0167] In certain embodiments, the population of cells is expanded in culture for 5 days, and the resulting cells are more potent than the same cells expanded in culture for 9 days under the same culture conditions.

[0168] In other embodiments, the population of cells is expanded in culture for 5 days show at least a one, two, three or four fold increase in cell doublings upon antigen stimulation as compared to the same cells expanded in culture for 9 days under the same culture conditions.

[0169] In yet other embodiments, the population of cells is expanded in culture for 5 days, and the resulting cells exhibit higher proinflammatory IFN-γ and/or GM-CSF levels, as compared to the same cells expanded in culture for 9 days under the same culture conditions.

[0170] In other embodiments, the population of cells is expanded by culturing the cells in the presence of an agent that stimulates a CD3/TCR complex associated signal and/or a ligand that stimulates a costimulatory molecule on the surface of the cells. The agent can be a bead conjugated with anti-CD3 antibody, or a fragment thereof, and/or anti-CD28 antibody, or a fragment thereof.

[0171] In other embodiments, the population of cells is expanded in an appropriate media that includes one or more interleukin that result in at least a 200-fold, 250-fold, 300-fold, or 350-fold increase in cells over a 14 day expansion period, as measured by flow cytometry.

[0172] In other embodiments, the population of cells is expanded in the presence IL-15 and/or IL-7.

[0173] In certain embodiments, the method further includes cryopreserving the population of the cells after the appropriate expansion period.

[0174] In yet other embodiments, the method of making disclosed herein further comprises contacting the population of immune effector cells with a nucleic acid encoding a telomerase subunit, e.g., hTERT. The nucleic acid encoding the telomerase subunit can be DNA.

[0175] The present invention also provides a method of generating a population of RNA-engineered cells, e.g., cells described herein, e.g., immune effector cells (e.g., T cells, NK cells), transiently expressing exogenous RNA. The method comprises introducing an in vitro transcribed RNA or synthetic RNA into a cell, where the RNA comprises a nucleic acid encoding an anti-target CAR molecule, e.g., as described herein.

[0176] In another aspect, the invention pertains to a method of providing an anti-tumor immunity in a subject comprising administering to the subject an effective amount of a cell comprising an anti-target CAR molecule, e.g., as described herein. In one embodiment, the cell is an autologous T cell or NK cell. In one embodiment, the cell is an allogeneic T cell or NK cell. In one embodiment, the autologous or allogenic T cell or NK cell lacks expression or has low expression of a functional TCR or a functional HLA. In one embodiment, the subject is a human.

[0177] In one aspect, the invention includes a population of autologous cells that are transfected or transduced with a vector comprising a nucleic acid molecule encoding an anti-target CAR molecule, e.g., as described herein. In one embodiment, the vector is a retroviral vector. In one embodiment, the vector is a self-inactivating lentiviral vector as described elsewhere herein. In one embodiment, the vector is delivered (e.g., by transfecting or electroporating) to a cell, e.g., a T cell or a NK cell, wherein the vector comprises a nucleic acid molecule encoding an anti-target CAR, e.g., as described herein, which is transcribed as an mRNA molecule, and the anti-target CARs of the present invention is translated from the RNA molecule and expressed on the surface of the cell.

[0178] In another aspect, the present invention provides a population of cells wherein at least one cell in the population expresses an anti-target CAR having a ligand that binds a target CAR as described herein, and a second cell expressing another agent, e.g., an agent which enhances the activity of an anti-target CAR-expressing cell. For example, in one embodiment, the agent can be an agent which inhibits an inhibitory molecule. Examples of inhibitory molecules include PD-1, PD-L1, CTLA-4, TIM-3, CEACAM (e.g., CEACAM-1, CEACAM-3 and/or CEACAM-5), LAG-3, VISTA, BTLA, TIGIT, LAIR1, CD160, 2B4 and TGF beta. In one embodiment, the agent which inhibits an inhibitory molecule, e.g., is a molecule described herein, e.g., an agent that comprises a first polypeptide, e.g., an inhibitory molecule, associated with a second polypeptide that provides a positive signal to the cell, e.g., an intracellular signaling domain described herein. In one embodiment, the agent comprises a first polypeptide, e.g., of an inhibitory molecule such as PD-1, LAG-3, CTLA-4, CD160, BTLA, LAIR1, TIM-3, CEACAM (e.g., CEACAM-1, CEACAM-3 and/or CEACAM-5), 2B4 and TIGIT, or a fragment of any of these, and a second polypeptide which is an intracellular signaling domain described herein (e.g., comprising a costimulatory domain (e.g., 4-1BB, CD27 or CD28, e.g., as described herein) and/or a primary signaling domain (e.g., a CD3 zeta signaling domain described herein). In one embodiment, the agent comprises a first polypeptide of PD-1 or a fragment thereof, and a second polypeptide of an intracellular signaling domain described herein (e.g., a CD28, CD27, OX40 or 4-IBB signaling domain described herein and/or a CD3 zeta signaling domain described herein).

[0179] In one embodiment, the nucleic acid molecule encoding an anti-target CAR of the present invention molecule, e.g., as described herein, is expressed as an mRNA molecule. In one embodiment, the genetically modified anti-target CAR of the present invention-expressing cells, e.g., immune effector cells (e.g., T cells, NK cells), can be generated by transfecting or electroporating an RNA molecule encoding the desired anti-target CARs (e.g., without a vector sequence) into the cell. In one embodiment, an anti-target CAR of the present invention molecule is translated from the RNA molecule once it is incorporated and expressed on the surface of the recombinant cell.

### Target CAR

[0180] In an embodiment, a target CAR as described herein, comprises: i) an antigen binding domain, ii) a transmembrane domain, and iii) an intracellular signaling domain, e.g., comprising a primary signaling domain and/or a costimulatory domain.

[0181] In some embodiments, the antigen binding domain of the target CAR binds a tumor antigen, e.g., a tumor antigen described herein. In some embodiments, the tumor antigen is chosen from one or more of: CD19; CD123; CD22; CD30; CD171; CS-1 (also referred to as CD2 subset 1, CRACC, SLAMF7, CD319, and 19A24); C-type lectin-like molecule-1 (CLL-1 or CLECL1); CD33; epidermal growth factor receptor variant III (EGFRvIII); ganglioside G2 (GD2); ganglioside GD3 (aNeu5Ac (2-8) aNeu5Ac (2-3) bDGalp (1-4) bDGlcp (1-1) Cer); TNF receptor family member B cell maturation (BCMA); Tn antigen ((Tn Ag) or (GalNAca-Ser/Thr)); prostate-specific membrane antigen (PSMA); Receptor tyrosine kinase-like orphan receptor 1 (ROR1); Fms-Like Tyrosine Kinase 3 (FLT3); Tumor-associated glycoprotein 72 (TAG72); CD38; CD44v6; Carcinoembryonic antigen (CEA); Epithelial cell adhesion molecule (EPCAM); B7H3 (CD276); KIT (CD117); Interleukin-13 receptor subunit alpha-2 (IL-13Ra2 or CD213A2); Mesothelin; Interleukin 11 receptor alpha (IL-11Ra); prostate stem cell antigen (PSCA); Protease Serine 21 (Testisin or PRSS21); vascular endothelial growth factor receptor 2 (VEGFR2); Lewis (Y) antigen; CD24; Platelet-derived growth factor receptor beta (PDGFR-beta); Stage-specific embryonic antigen-4 (SSEA-4); CD20; Folate receptor alpha; Receptor tyrosine-protein kinase ERBB2 (Her2/neu); Mucin 1, cell surface associated (MUC1); epidermal growth factor receptor (EGFR); neural cell adhesion molecule (NCAM); Prostase; prostatic acid phosphatase (PAP); elongation factor 2 mutated (ELF2M); Ephrin B2; fibroblast activation protein alpha (FAP); insulin-like growth factor 1 receptor (IGF-I receptor), carbonic anhydrase IX (CAIX); Proteasome (Prosome, Macropain) Subunit, Beta Type, 9 (LMP2); glycoprotein 100 (gp100); oncogene fusion protein consisting of breakpoint cluster region (BCR) and Abelson murine leukemia viral oncogene homolog 1 (Abl) (bcr-abl); tyrosinase; ephrin type-A receptor 2 (EphA2); Fucosyl GM1; sialyl Lewis adhesion molecule (sLe); ganglioside GM3 (aNeu5Ac (2-3) bDGalp (1-4) bDGlcp (1-1) Cer); transglutaminase 5 (TGS5); high molecular weight-melanoma-associated antigen (HMWMAA); o-acetyl-GD2 ganglioside (OAcGD2); Folate receptor beta; tumor endothelial marker 1 (TEM1/CD248); tumor endothelial marker 7-related (TEM7R); claudin 6 (CLDN6); thyroid stimulating hormone receptor (TSHR); G protein-coupled receptor class C group 5, member D (GPRC5D); chromosome X open reading frame 61 (CXORF61); CD97; CD179a; anaplastic lymphoma kinase (ALK); Polysialic acid; placenta-specific 1 (PLAC1); hexasaccharide portion of globoH glycoceramide (GloboH); mammary gland differentiation antigen (NY-BR-1); uroplakin 2 (UPK2); Hepatitis A virus cellular receptor 1 (HAVCR1); adrenoceptor beta 3 (ADRB3); pannexin 3 (PANX3); G protein-coupled receptor 20 (GPR20); lymphocyte antigen 6 complex, locus K 9 (LY6K); Olfactory receptor 51E2 (OR51E2); TCR Gamma Alternate Reading Frame Protein (TARP); Wilms tumor protein (WT1); Cancer/testis antigen 1 (NY-ESO-1); Cancer/testis antigen 2 (LAGE-1a); Melanoma-associated antigen 1 (MAGE-A1); ETS translocation-variant gene 6, located on chromosome 12p (ETV6-AML); sperm protein 17 (SPA17); X Antigen Family, Member 1A (XAGE1); angiopoietin-binding cell surface receptor 2 (Tie 2); melanoma cancer testis antigen-1 (MAD-CT-1); melanoma cancer testis antigen-2 (MAD-CT-2); Fos-related antigen 1; tumor protein p53 (p53); p53 mutant; prostein; surviving; telomerase; prostate carcinoma tumor antigen-1 (PCTA-1 or Galectin 8), melanoma antigen recognized by T cells 1 (MelanA or MART1); Rat sarcoma (Ras) mutant; human Telomerase reverse transcriptase (hTERT); sarcoma translocation breakpoints; melanoma inhibitor of apoptosis (ML-IAP); ERG (transmembrane protease, serine 2 (TMPRSS2) ETS fusion gene); N-Acetyl glucosaminyl-transferase V (NA17); paired box protein Pax-3 (PAX3); Androgen receptor; Cyclin B1; v-myc avian myelocytomatosis viral oncogene neuroblastoma derived homolog (MYCN); Ras Homolog Family Member C (RhoC); Tyrosinase-related protein 2 (TRP-2); Cytochrome P450 1B1 (CYP1B1); CCCTC-Binding Factor (Zinc Finger Protein)-Like (BORIS or Brother of the Regulator of Imprinted Sites), Squamous Cell Carcinoma Antigen Recognized By T Cells 3 (SART3); Paired box protein Pax-5 (PAX5); proacrosin binding protein sp32 (OY-TES1); lymphocyte-specific protein tyrosine kinase (LCK); A kinase anchor protein 4 (AKAP-4); synovial sarcoma, X breakpoint 2 (SSX2); Receptor for Advanced Glycation Endproducts (RAGE-1); renal ubiquitous 1 (RU1); renal ubiquitous 2 (RU2); legumain; human papilloma virus E6 (HPV E6); human papilloma virus E7 (HPV E7); intestinal carboxyl esterase; heat shock protein 70-2 mutated (mut hsp70-2); CD79a; CD79b; CD72; Leukocyte-associated immunoglobulin-like receptor 1 (LAIR1); Fc fragment of IgA receptor (FCAR or CD89); Leukocyte immunoglobulin-like receptor subfamily A member 2 (LILRA2); CD300 molecule-like family member f (CD300LF); C-type lectin domain family 12 member A (CLEC12A); bone marrow stromal cell antigen 2 (BST2); EGF-like module-containing mucin-like hormone receptor-like 2 (EMR2); lymphocyte antigen 75 (LY75); Glypican-3 (GPC3); Fc receptor-like 5 (FCRL5); and immunoglobulin lambda-like polypeptide 1 (IGLL1).

[0182] In some embodiments, tumor antigen bound by the target CAR is chosen from one or more of: TSHR, CD171, CS-1, CLL-1, GD3, Tn Ag, FLT3, CD38, CD44v6, B7H3, KIT, IL-13Ra2, IL-11Ra, PSCA, PRSS21, VEGFR2, LewisY, CD24, PDGFR-beta, SSEA-4, MUC1, EGFR, NCAM, CAIX, LMP2, EphA2, Fucosyl GM1, sLe, GM3, TGS5, HMWMAA, o-acetyl-GD2, Folate receptor beta, TEM1/CD248, TEM7R, CLDN6, GPRC5D, CXORF61, CD97, CD179a, ALK, Polysialic acid, PLAC1, GloboH, NY-BR-1, UPK2, HAVCR1, ADRB3, PANX3, GPR20, LY6K, OR51E2, TARP, WT1, ETV6-AML, sperm protein 17, XAGE1, Tie 2, MAD-CT-1, MAD-CT-2, Fos-related antigen 1, p53 mutant, hTERT, sarcoma translocation breakpoints, ML-IAP, ERG (TMPRSS2 ETS fusion gene), NA17, PAX3, Androgen receptor, Cyclin B1, MYCN, RhoC, CYP1B1, BORIS, SART3, PAX5, OY-TES1, LCK, AKAP-4, SSX2, CD79a, CD79b, CD72, LAIR1, FCAR, LILRA2, CD300LF, CLEC12A, BST2, EMR2, LY75, GPC3, FCRL5, and IGLL1.

[0183] In certain embodiments, the tumor antigen bound by the target CAR is chosen from one or more of: TSHR, CLDN6, GPRC5D, CXORF61, CD97, CD179a, ALK, Polysialic acid, PLAC1, GloboH, NY-BR-1, UPK2, HAVCR1, ADRB3, PANX3, GPR20, LY6K, OR51E2, CD150, 5T4, ActRIIA, B7, BMCA, CA-125, CCNA1, CD123, CD126, CD138, CD14, CD148, CD15, CD19, CD20, CD200, CD21, CD22, CD23, CD24, CD25, CD26, CD261, CD262, CD30, CD33, CD362, CD37,CD38, CD4, CD40, CD40L, CD44, CD46, CD5, CD52, CD53, CD54, CD56, CD66a-d, CD74, CD8, CD80, CD92, CE7, CS-1, CSPG4, ED-B fibronectin, EGFR, EGFRVIII, EGP-2, EGP-4, EPHa2, ErbB2, ErbB3, ErbB4, FBP, GD2, GD3, HER1-HER2 in combination, HER2-HER3 in combination, HERV—K, HIV-1 envelope glycoprotein gp120, HIV-1 envelope glycoprotein gp41, HLA-DR, HM1.24, HMW-MAA, Her2, Her2/neu, IGF-1R, IL-11Ralpha, IL-13R-alpha2, IL-2, IL-22R-alpha, IL-6, IL-6R, Ia, Ii, L1-CAM, L1-cell adhesion molecule, Lewis Y, LI-CAM, MAGE A3, MAGE-A1, MART-1, MUC1, NKG2C ligands, NKG2D Ligands, NY-ESO-1, OEPHa2, PIGF, PSCA, PSMA, ROR1, T101, TAC, TAG72, TIM-3, TRAIL-R1, TRAIL-R1 (DR4), TRAIL-R2 (DR5), VEGF, VEGFR2, WT-1, a G-protein coupled receptor, alphafetoprotein (AFP), an angiogenesis factor, an exogenous cognate binding molecule (ExoCBM), oncogene product, anti-folate receptor, c-Met, carcinoembryonic antigen (CEA), cyclin (D1), ephrinB2, epithelial tumor antigen, estrogen receptor, fetal acethycholine e receptor, folate binding protein, gp100, hepatitis B surface antigen, kappa chain, kappa light chain, kdr, lambda chain, livin, melanoma-associated antigen, mesothelin, mouse double minute 2 homolog (MDM2), mucin 16 (MUC16), mutated p53, mutated ras, necrosis antigens, oncofetal antigen, ROR2, progesterone receptor, prostate specific antigen, tEGFR, tenascin, β2-Microglobulin, Fc Receptor-like 5 (FcRL5), or molecules expressed by HIV, HCV, HBV, or other pathogens.

[0184] In some embodiments, the antigen binding domain of the target CAR molecule comprises an antibody, an antibody fragment, an scFv, a Fv, a Fab, a (Fab′) 2, a single domain antibody (SDAB), a VH or VL domain, or a camelid VHH domain.

[0185] In some embodiments, the transmembrane domain of the target CAR molecule comprises a transmembrane domain chosen from the transmembrane domain of an alpha, beta or zeta chain of a T-cell receptor, CD28, CD3 epsilon, CD45, CD4, CD5, CD8, CD9, CD16, CD22, CD33, CD37, CD64, CD80, CD86, CD134, CD137, CD154, KIRDS2, OX40, CD2, CD27, LFA-1 (CD11a, CD18), ICOS (CD278), 4-1BB (CD137), GITR, CD40, BAFFR, HVEM (LIGHTR), SLAMF7, NKp80 (KLRF1), CD160, CD19, IL2R beta, IL2R gamma, IL7R a, ITGA1, VLA1, CD49a, ITGA4, IA4, CD49D, ITGA6, VLA-6, CD49f, ITGAD, CD11d, ITGAE, CD103, ITGAL, CD11a, LFA-1, ITGAM, CD11b, ITGAX, CD11c, ITGB1, CD29, ITGB2, CD18, LFA-1, ITGB7, TNFR2, DNAM1 (CD226), SLAMF4 (CD244, 2B4), CD84, CD96 (Tactile), CEACAM1, CRTAM, Ly9 (CD229), CD160 (BY55), PSGL1, CD100 (SEMA4D), SLAMF6 (NTB-A, Ly108), SLAM (SLAMF1, CD150, IPO-3), BLAME (SLAMF8), SELPLG (CD162), LTBR, PAG/Cbp, NKp44, NKp30, NKp46, NKG2D, and/or NKG2C.

[0186] In one embodiment, the target CAR is a CD19 CAR, a CD22 CAR, a CD123 CAR, a CD33 CAR, a mesothelin CAR, an EGFRVIII CAR, a CLL-1 CAR, or a CAR described herein. In one embodiment, the target CAR is a CD19 CAR, e.g., a CAR comprising an scFv amino acid sequence of SEQ ID NOs: 893, 898, 903, 908, 913, 918, 923, 928, 933, 938, 943, 948, or 953, or a CAR comprising the amino acid sequence of SEQ ID NOs: 2020-2022.

[0187] In one embodiment, the target CAR comprises an antibody or antibody fragment which includes a anti-CD19 binding domain, a transmembrane domain, and an intracellular signaling domain comprising a stimulatory domain, and wherein said anti-CD19 binding domain comprises one or more of light chain complementary determining region 1 (LC CDR1), light chain complementary determining region 2 (LC CDR2), and light chain complementary determining region 3 (LC CDR3) of any anti-CD19 light chain binding domain amino acid sequence listed in Table 3, and one or more of heavy chain complementary determining region 1 (HC CDR1), heavy chain complementary determining region 2 (HC CDR2), and heavy chain complementary determining region 3 (HC CDR3) of any anti-CD19 heavy chain binding domain amino acid sequence listed in Table 3.

[0188] In one embodiment, the target CAR comprises an antibody or antibody fragment which includes a anti-CD19 binding domain, a transmembrane domain, and an intracellular signaling domain comprising a stimulatory domain, and wherein said anti-CD19 binding domain comprises one or more of light chain complementary determining region 1 (LC CDR1), light chain complementary determining region 2 (LC CDR2), and light chain complementary determining region 3 (LC CDR3) of any anti-CD19 light chain binding domain amino acid sequence listed in Table 4B, and one or more of heavy chain complementary determining region 1 (HC CDR1), heavy chain complementary determining region 2 (HC CDR2), and heavy chain complementary determining region 3 (HC CDR3) of any anti-CD19 heavy chain binding domain amino acid sequence listed in Table 4A.

[0189] In one embodiment, the anti-CD19 binding domain of the target CAR comprises a sequence of SEQ ID NO: 898, or SEQ ID NO:957.

[0190] In one embodiment, the target CAR comprises a polypeptide having a sequence of SEQ ID NO: 902, or SEQ ID NO: 956.

[0191] In certain embodiments, the target CAR antigen binding domain has a binding affinity KD of 10⁻⁴ M to 10⁻⁸ M.

[0192] In one embodiment, the target CAR antigen binding domain is an antigen binding domain described herein, e.g., an antigen binding domain described herein for a target provided above.

### BRIEF DESCRIPTION OF THE DRAWINGS

[0193] FIG. 1A shows in vitro killing assays with NALM6 WT or NALM6 CAR19+expressing cells. CART19 cells or CART-CAR19 cells expressing anti-idiotypic scFv in the L2H or H2L orientation were incubated with target cells. Killing of NAPM6 CAR19+ cells was observed with CART-CAR19 cells in the L2H orientation and CART-CAR19 cells in the H2L orientation.

[0194] FIG. 1B shows in vivo leukemia control in the CHP107R xenograft model by CART-CAR19 cells. CHP107R cells were engrafted in NOD-SCID gamma chain deficient (NSG) mice, and recipient animals were treated with the CAR19 or CART-CAR19 L2H cells, or left untreated.

[0195] FIGS. 2A-2D show depletion of CART19 expressing cells by anti-CAR CART expressing cells. Cells expressing anti-CAR CART were labeled with CFSE and cells expressing CART19 or CART22 were labeled with Cell tracker violet (CTV). The CFSE labeled cells and the CTV labeled cells were then co-cultured at different ratios and the ratio of CFSE: CTV signal was assessed by flow cytometry at 24 and 48 hours.

### DETAILED DESCRIPTION

[0196] In general, the invention features a T-cell containing an anti-target CAR which binds to a target CAR, e.g., a target CAR described herein.

### Definitions

[0197] Unless defined otherwise, all technical and scientific terms used herein have the same meaning as commonly understood by one of ordinary skill in the art to which the invention pertains.

[0198] The term “a” and “an” refers to one or to more than one (i.e., to at least one) of the grammatical object of the article. By way of example, “an element” means one element or more than one element.

[0199] The term “about” when referring to a measurable value such as an amount, a temporal duration, and the like, is meant to encompass variations of ±20% or in some instances±10%, or in some instances±5%, or in some instances±1%, or in some instances±0.1% from the specified value, as such variations are appropriate to perform the disclosed methods.

[0200] The term “Chimeric Antigen Receptor” or alternatively a “CAR” refers to a set of polypeptides, typically two in the simplest embodiments, which when in an immune effector cell, provides the cell with specificity for a target cell, typically a cancer cell, and with intracellular signal generation. In some embodiments, a CAR comprises at least an extracellular antigen binding domain, a transmembrane domain and a cytoplasmic signaling domain (also referred to herein as “an intracellular signaling domain”) comprising a functional signaling domain derived from a stimulatory molecule and/or costimulatory molecule as defined below. In some aspects, the set of polypeptides are contiguous with each other. In some embodiments, the set of polypeptides include a dimerization switch that, upon the presence of a dimerization molecule, can couple the polypeptides to one another, e.g., can couple an antigen binding domain to an intracellular signaling domain. In one aspect, the stimulatory molecule is the zeta chain associated with the T cell receptor complex. In one aspect, the cytoplasmic signaling domain further comprises one or more functional signaling domains derived from at least one costimulatory molecule as defined below. In one aspect, the costimulatory molecule is chosen from the costimulatory molecules described herein, e.g., 4-1BB (i.e., CD137), CD27 and/or CD28. In one aspect, the CAR comprises a chimeric fusion protein comprising an extracellular antigen binding domain, a transmembrane domain and an intracellular signaling domain comprising a functional signaling domain derived from a stimulatory molecule. In one aspect, the CAR comprises a chimeric fusion protein comprising an extracellular antigen binding domain, a transmembrane domain and an intracellular signaling domain comprising a functional signaling domain derived from a costimulatory molecule and a functional signaling domain derived from a stimulatory molecule. In one aspect, the CAR comprises a chimeric fusion protein comprising an extracellular antigen binding domain, a transmembrane domain and an intracellular signaling domain comprising two functional signaling domains derived from one or more costimulatory molecule(s) and a functional signaling domain derived from a stimulatory molecule. In one aspect, the CAR comprises a chimeric fusion protein comprising an extracellular antigen binding domain, a transmembrane domain and an intracellular signaling domain comprising at least two functional signaling domains derived from one or more costimulatory molecule(s) and a functional signaling domain derived from a stimulatory molecule. In one aspect the CAR comprises an optional leader sequence at the amino-terminus (N-ter) of the CAR fusion protein. In one aspect, the CAR further comprises a leader sequence at the N-terminus of the extracellular antigen binding domain, wherein the leader sequence is optionally cleaved from the antigen binding domain (e.g., a scFv) during cellular processing and localization of the CAR to the cellular membrane.

[0201] A CAR that comprises an antigen binding domain (e.g., a scFv, or TCR) that targets a specific tumor maker X, such as those described herein, is also referred to as XCAR. For example, a CAR that comprises an antigen binding domain that targets CD19 is referred to as CD19CAR.

[0202] As used herein, “anti-target CAR” refers to a CAR that binds a target CAR, e.g., binds the antigen binding domain of the target CAR, e.g., binds an antibody molecule portion of the target CAR. In some embodiments, an anti-target CAR comprises at least an extracellular ligand that binds to a target CAR, a transmembrane domain, and a cytoplasmic signaling domain comprising a functional signaling domain derived from a stimulatory molecule and/or costimulatory molecule, e.g., as described herein. In some embodiments, the ligand that binds to a target CAR comprises an antibody molecule (e.g., anti-idiotypic antibody molecule) that binds the target CAR, e.g., binds an extracellular domain of the target CAR, e.g., the antigen binding domain or hinge of the target CAR, e.g., binds an antibody molecule portion of the target CAR.

[0203] The term “ligand that binds to a target CAR” as used herein refers to a molecule that binds to a CAR polypeptide or a portion of a CAR polypeptide. The CAR polypeptide bound by the ligand that binds to a target CAR is referred to herein as a “target CAR”. In some embodiments, the ligand binds to the target CAR extracellular domain, e.g., the ligand binds to the target CAR antigen binding domain, e.g., the portion of the target CAR comprising an antibody or antibody fragment. In some embodiments, the ligand binds to the hinge of the target CAR. In some embodiments, the ligand binds the target CAR hinge and the target CAR antigen binding domain. In some embodiments, the ligand is an antigen molecule, e.g., a cognate antigen molecule, e.g., as described herein. In other embodiments, the ligand is an antibody molecule, e.g., an anti-idiotypic antibody molecule, e.g., an anti-antigen (e.g., CD19) idiotypic antibody molecule as described herein.

[0204] The term “cognate antigen molecule” refers to any antigen described herein. In some embodiments, it refers to an antigen bound, e.g., recognized or targeted, by a CAR polypeptide, e.g., any target CAR described herein. In some embodiments, it refers to a cancer associated antigen described herein. In some embodiments, the cognate antigen molecule is a recombinant molecule.

[0205] The term “anti-idiotypic (or idiotype) antibody molecule” or “anti-antigen idiotypic (idiotype) antibody molecule” refers to an antibody molecule that binds to an antibody, e.g., the antigen-binding site or the variable region of a target antibody (e.g., an antibody in the target CAR). In some embodiments, the anti-idiotypic antibody molecule competes for binding with the antigen recognized by the target antibody, e.g., an antigen as described herein (e.g., a cognate antigen molecule as described herein). In some embodiments, the anti-idiotypic antibody molecule binds to the CAR antigen binding domain, e.g., the portion of the CAR comprising an antibody or antibody fragment (e.g., the antigen binding portion of the CAR).

[0206] As used herein, “disease associated with expression of a target CAR” includes, but is not limited to, a disease associated with expression of a target CAR as described herein or condition associated with cells which express a target CAR as described herein including, e.g., proliferative diseases such as a cancer or malignancy or a precancerous condition such as a myelodysplasia, a myelodysplastic syndrome or a preleukemia; or a noncancer related indication associated with cells which express a target CAR as described herein. In an embodiment, the disease associated with expression of a target CAR is a cancer, e.g., a cancer wherein one or more cancer cells expresses a target CAR. In an embodiment, the disease associated with expression of a target CAR is B-cell aplasia. In an embodiment, a cancer associated with expression of a target CAR as described herein is a hematological cancer. In an embodiment, a cancer associated with expression of a target CAR as described herein is a solid cancer. In embodiments, the target CAR is expressed in cells of the disease associated with expression of a CAR.

[0207] As used herein, a “CD19-negative” cell refers to a cell having a loss or alteration in CD19. It shall be understood that a CD19-negative cancer need not have 100% loss of CD19, but a sufficient reduction to reduce the effectiveness of a CD19 therapy such that the cell is resistant to the CD19 therapy. In some embodiments the cells do not comprise the CD19 protein (e.g., do not comprise the CD19 protein expressed on the cell surface), and in other embodiments the cells comprise a portion of the CD19 protein that does not include the antigen. In some embodiments, the CD19-negative cells comprise a truncation, deletion, or frameshift mutation in CD19 that removes or mutates the antigen. Similarly, a “CD19-negative relapse” is a relapsed disease in which some or all of the cells, e.g., cancer cells, are CD19-negative cells, and a “CD19-negative cancer” is a cancer in which some or all of the cancer cells are CD19-negative cancer cells. Likewise, cells that are CD33-negative, EGFRvIII-negative, mesothelin-negative, BCMA-negative, CD20-negative, CD123-negative, or CLL-1 negative are cells that have a loss or alteration in the specified antigen bound by a CAR, e.g., the cells do not comprise the specified protein, or comprise a portion of the specified protein that does not comprise the specified antigen.

[0208] The term “signaling domain” refers to the functional portion of a protein which acts by transmitting information within the cell to regulate cellular activity via defined signaling pathways by generating second messengers or functioning as effectors by responding to such messengers.

[0209] The term “antibody,” as used herein, refers to a protein, or polypeptide sequence derived from an immunoglobulin molecule which specifically binds with an antigen. Antibodies can be polyclonal or monoclonal, multiple or single chain, or intact immunoglobulins, and may be derived from natural sources or from recombinant sources. Antibodies can be tetramers of immunoglobulin molecules.

[0210] The term “antibody fragment” refers to at least one portion of an antibody, that retains the ability to specifically interact with (e.g., by binding, steric hindrance, stabilizing/destabilizing, spatial distribution) an epitope of an antigen. Examples of antibody fragments include, but are not limited to, Fab, Fab′, F(ab′)₂, Fv fragments, scFv antibody fragments, disulfide-linked Fvs (sdFv), a Fd fragment consisting of the VH and CH1 domains, linear antibodies, single domain antibodies such as sdAb (either VL or VH), camelid VHH domains, multi-specific antibodies formed from antibody fragments such as a bivalent fragment comprising two Fab fragments linked by a disulfide bridge at the hinge region, and an isolated CDR or other epitope binding fragments of an antibody. An antigen binding fragment can also be incorporated into single domain antibodies, maxibodies, minibodies, nanobodies, intrabodies, diabodies, triabodies, tetrabodies, v-NAR and bis-scFv (see, e.g., Hollinger and Hudson, Nature Biotechnology 23:1126-1136, 2005). Antigen binding fragments can also be grafted into scaffolds based on polypeptides such as a fibronectin type III (Fn3) (see U.S. Pat. No. 6,703,199, which describes fibronectin polypeptide minibodies).

[0211] The term “scFv” refers to a fusion protein comprising at least one antibody fragment comprising a variable region of a light chain and at least one antibody fragment comprising a variable region of a heavy chain, wherein the light and heavy chain variable regions are contiguously linked, e.g., via a synthetic linker, e.g., a short flexible polypeptide linker, and capable of being expressed as a single chain polypeptide, and wherein the scFv retains the specificity of the intact antibody from which it is derived. Unless specified, as used herein an scFv may have the VL and VH variable regions in either order, e.g., with respect to the N-terminal and C-terminal ends of the polypeptide, the scFv may comprise VL-linker-VH or may comprise VH-linker-VL.

[0212] The portion of the CAR of the invention comprising an antibody or antibody fragment thereof may exist in a variety of forms where the antigen binding domain is expressed as part of a contiguous polypeptide chain including, for example, a single domain antibody fragment (sdAb), a single chain antibody (scFv), a humanized antibody or bispecific antibody (Harlow et al., 1999, In: Using Antibodies: A Laboratory Manual, Cold Spring Harbor Laboratory Press, NY; Harlow et al., 1989, In: Antibodies: A Laboratory Manual, Cold Spring Harbor, New York; Houston et al., 1988, Proc. Natl. Acad. Sci. USA 85:5879-5883; Bird et al., 1988, Science 242:423-426). In one aspect, the antigen binding domain of a CAR composition of the invention comprises an antibody fragment. In a further aspect, the CAR comprises an antibody fragment that comprises a scFv. The precise amino acid sequence boundaries of a given CDR can be determined using any of a number of well-known schemes, including those described by Kabat et al. (1991), “Sequences of Proteins of Immunological Interest,” 5th Ed. Public Health Service, National Institutes of Health, Bethesda, MD (“Kabat” numbering scheme), A1-Lazikani et al., (1997) JMB 273,927-948 (“Chothia” numbering scheme), or a combination thereof.

[0213] As used herein, the term “binding domain” or “antibody molecule” refers to a protein, e.g., an immunoglobulin chain or fragment thereof, comprising at least one immunoglobulin variable domain sequence. The term “binding domain” or “antibody molecule” encompasses antibodies and antibody fragments. In an embodiment, an antibody molecule is a multispecific antibody molecule, e.g., it comprises a plurality of immunoglobulin variable domain sequences, wherein a first immunoglobulin variable domain sequence of the plurality has binding specificity for a first epitope and a second immunoglobulin variable domain sequence of the plurality has binding specificity for a second epitope. In an embodiment, a multispecific antibody molecule is a bispecific antibody molecule. A bispecific antibody has specificity for no more than two antigens. A bispecific antibody molecule is characterized by a first immunoglobulin variable domain sequence which has binding specificity for a first epitope and a second immunoglobulin variable domain sequence that has binding specificity for a second epitope.

[0214] The portion of the CAR of the invention comprising an antibody or antibody fragment thereof may exist in a variety of forms where the antigen binding domain is expressed as part of a contiguous polypeptide chain including, for example, a single domain antibody fragment (sdAb), a single chain antibody (scFv), a humanized antibody, or bispecific antibody (Harlow et al., 1999, In: Using Antibodies: A Laboratory Manual, Cold Spring Harbor Laboratory Press, NY; Harlow et al., 1989, In: Antibodies: A Laboratory Manual, Cold Spring Harbor, New York; Houston et al., 1988, Proc. Natl. Acad. Sci. USA 85:5879-5883; Bird et al., 1988, Science 242:423-426). In one aspect, the antigen binding domain of a CAR composition of the invention comprises an antibody fragment. In a further aspect, the CAR comprises an antibody fragment that comprises a scFv.

[0215] The term “antibody heavy chain,” refers to the larger of the two types of polypeptide chains present in antibody molecules in their naturally occurring conformations, and which normally determines the class to which the antibody belongs.

[0216] The term “antibody light chain,” refers to the smaller of the two types of polypeptide chains present in antibody molecules in their naturally occurring conformations. Kappa (and lambda (D) light chains refer to the two major antibody light chain isotypes.

[0217] The term “recombinant antibody” refers to an antibody which is generated using recombinant DNA technology, such as, for example, an antibody expressed by a bacteriophage or yeast expression system. The term should also be construed to mean an antibody which has been generated by the synthesis of a DNA molecule encoding the antibody and which DNA molecule expresses an antibody protein, or an amino acid sequence specifying the antibody, wherein the DNA or amino acid sequence has been obtained using recombinant DNA or amino acid sequence technology which is available and well known in the art.

[0218] The term “antigen” or “Ag” refers to a molecule that provokes an immune response. This immune response may involve either antibody production, or the activation of specific immunologically-competent cells, or both. The skilled artisan will understand that any macromolecule, including virtually all proteins or peptides, can serve as an antigen. Furthermore, antigens can be derived from recombinant or genomic DNA. A skilled artisan will understand that any DNA, which comprises a nucleotide sequences or a partial nucleotide sequence encoding a protein that elicits an immune response therefore encodes an “antigen” as that term is used herein. Furthermore, one skilled in the art will understand that an antigen need not be encoded solely by a full length nucleotide sequence of a gene. It is readily apparent that the present invention includes, but is not limited to, the use of partial nucleotide sequences of more than one gene and that these nucleotide sequences are arranged in various combinations to encode polypeptides that elicit the desired immune response. Moreover, a skilled artisan will understand that an antigen need not be encoded by a “gene” at all. It is readily apparent that an antigen can be generated synthesized or can be derived from a biological sample, or might be macromolecule besides a polypeptide. Such a biological sample can include, but is not limited to a tissue sample, a tumor sample, a cell or a fluid with other biological components.

[0219] The term “anti-cancer effect” refers to a biological effect which can be manifested by various means, including but not limited to, e.g., a decrease in tumor volume, a decrease in the number of cancer cells, a decrease in the number of metastases, an increase in life expectancy, decrease in cancer cell proliferation, decrease in cancer cell survival, or amelioration of various physiological symptoms associated with the cancerous condition. An “anti-cancer effect” can also be manifested by the ability of the peptides, polynucleotides, cells and antibodies in prevention of the occurrence of cancer in the first place. The term “anti-tumor effect” refers to a biological effect which can be manifested by various means, including but not limited to, e.g., a decrease in tumor volume, a decrease in the number of tumor cells, a decrease in tumor cell proliferation, or a decrease in tumor cell survival.

[0220] The term “autologous” refers to any material derived from the same individual to whom it is later to be re-introduced into the individual.

[0221] The term “allogeneic” refers to any material derived from a different animal of the same species as the individual to whom the material is introduced. Two or more individuals are said to be allogeneic to one another when the genes at one or more loci are not identical. In some aspects, allogeneic material from individuals of the same species may be sufficiently unlike genetically to interact antigenically

[0222] The term “xenogeneic” refers to a graft derived from an animal of a different species.

[0223] The term “cancer” refers to a disease characterized by the uncontrolled growth of aberrant cells. Cancer cells can spread locally or through the bloodstream and lymphatic system to other parts of the body. Examples of various cancers are described herein and include but are not limited to, breast cancer, prostate cancer, ovarian cancer, cervical cancer, skin cancer, pancreatic cancer, colorectal cancer, renal cancer, liver cancer, brain cancer, lymphoma, leukemia, lung cancer and the like. The terms “tumor” and “cancer” are used interchangeably herein, e.g., both terms encompass solid and liquid, e.g., diffuse or circulating, tumors. As used herein, the term “cancer” or “tumor” includes premalignant, as well as malignant cancers and tumors.

[0224] “Derived from” as that term is used herein, indicates a relationship between a first and a second molecule. It generally refers to structural similarity between the first molecule and a second molecule and does not connotate or include a process or source limitation on a first molecule that is derived from a second molecule. For example, in the case of an intracellular signaling domain that is derived from a CD3zeta molecule, the intracellular signaling domain retains sufficient CD3zeta structure such that is has the required function, namely, the ability to generate a signal under the appropriate conditions. It does not connotate or include a limitation to a particular process of producing the intracellular signaling domain, e.g., it does not mean that, to provide the intracellular signaling domain, one must start with a CD3zeta sequence and delete unwanted sequence, or impose mutations, to arrive at the intracellular signaling domain.

[0225] The phrase “disease associated with expression of a tumor antigen as described herein” includes, but is not limited to, a disease associated with expression of a tumor antigen as described herein or condition associated with cells which express a tumor antigen as described herein including, e.g., proliferative diseases such as a cancer or malignancy or a precancerous condition such as a myelodysplasia, a myelodysplastic syndrome or a preleukemia; or a noncancer related indication associated with cells which express a tumor antigen as described herein. In one aspect, a cancer associated with expression of a tumor antigen as described herein is a hematological cancer. In one aspect, a cancer associated with expression of a tumor antigen as described herein is a solid cancer. Further diseases associated with expression of a tumor antigen described herein include, but not limited to, e.g., atypical and/or non-classical cancers, malignancies, precancerous conditions or proliferative diseases associated with expression of a tumor antigen as described herein. Non-cancer related indications associated with expression of a tumor antigen as described herein include, but are not limited to, e.g., autoimmune disease, (e.g., lupus), inflammatory disorders (allergy and asthma) and transplantation. In some embodiments, the tumor antigen-expressing cells express, or at any time expressed, mRNA encoding the tumor antigen. In an embodiment, the tumor antigen-expressing cells produce the tumor antigen protein (e.g., wild-type or mutant), and the tumor antigen protein may be present at normal levels or reduced levels. In an embodiment, the tumor antigen-expressing cells produced detectable levels of a tumor antigen protein at one point, and subsequently produced substantially no detectable tumor antigen protein.

[0226] The phrase “disease associated with expression of CD19” includes, but is not limited to, a disease associated with expression of CD19 (e.g., wild-type or mutant CD19) or condition associated with cells which express, or at any time expressed, CD19 (e.g., wild-type or mutant CD19) including, e.g., proliferative diseases such as a cancer or malignancy or a precancerous condition such as a myelodysplasia, a myelodysplastic syndrome or a preleukemia; or a noncancer related indication associated with cells which express CD19. For the avoidance of doubt, a disease associated with expression of CD19 may include a condition associated with cells which do not presently express CD19, e.g., because CD19 expression has been downregulated, e.g., due to treatment with a molecule targeting CD19, e.g., a CD19 CAR, but which at one time expressed CD19. In one aspect, a cancer associated with expression of CD19 is a hematological cancer. In one aspect, the hematological cancer is a leukemia or a lymphoma. In one aspect, a cancer associated with expression of CD19 includes cancers and malignancies including, but not limited to, e.g., one or more acute leukemias including but not limited to, e.g., B-cell acute Lymphoid Leukemia (BALL), T-cell acute Lymphoid Leukemia (TALL), acute lymphoid leukemia (ALL); one or more chronic leukemias including but not limited to, e.g., chronic myelogenous leukemia (CML), Chronic Lymphoid Leukemia (CLL). Additional cancers or hematologic conditions associated with expression of CD19 comprise, but are not limited to, e.g., B cell prolymphocytic leukemia, blastic plasmacytoid dendritic cell neoplasm, Burkitt's lymphoma, diffuse large B cell lymphoma, Follicular lymphoma, Hairy cell leukemia, small cell- or a large cell-follicular lymphoma, malignant lymphoproliferative conditions, MALT lymphoma, mantle cell lymphoma (MCL), Marginal zone lymphoma, multiple myeloma, myelodysplasia and myelodysplastic syndrome, non-Hodgkin lymphoma, Hodgkin lymphoma, plasmablastic lymphoma, plasmacytoid dendritic cell neoplasm, Waldenstrom macroglobulinemia, and “preleukemia” which are a diverse collection of hematological conditions united by ineffective production (or dysplasia) of myeloid blood cells, and the like. Further diseases associated with expression of CD19 expression include, but not limited to, e.g., atypical and/or non-classical cancers, malignancies, precancerous conditions or proliferative diseases associated with expression of CD19. Non-cancer related indications associated with expression of CD19 include, but are not limited to, e.g., autoimmune disease, (e.g., lupus), inflammatory disorders (allergy and asthma) and transplantation. In some embodiments, the CD19-expressing cells express, or at any time expressed, CD19 mRNA. In an embodiment, the CD19-expressing cells produce a CD19 protein (e.g., wild-type or mutant), and the CD19 protein may be present at normal levels or reduced levels. In an embodiment, the CD19-expressing cells produced detectable levels of a CD19 protein at one point, and subsequently produced substantially no detectable CD19 protein.

[0227] The term “disease associated with expression of a target CAR” as used herein includes but is not limited to a disease associated with expression of a target CAR, e.g., a target CAR as described herein, e.g., a CD19 CAR, or condition associated with cells which express a target CAR, e.g., a target CAR as described herein, e.g., a CD19 CAR, including, e.g., proliferative diseases such as a cancer or malignancy, a precancerous condition such as a myelodysplasia, a myelodysplastic syndrome or a preleukemia; or a noncancer related indication, e.g., B cell aplasia, associated with cells which express the target CAR. In one aspect, a disease associated with a target CAR, e.g., a target CAR described herein, is a solid cancer, e.g., a solid cancer described herein. In one aspect, a disease associated with a target CAR, e.g., a CD19 CAR, is a hematological cancer. In one aspect, the hematological cancer is a leukemia or a lymphoma. In one aspect, a disease associated with expression of a target CAR, e.g., a CD19 CAR, includes cancers and malignancies including, but not limited to, e.g., one or more acute leukemias including but not limited to, e.g., B-cell acute Lymphoid Leukemia (BALL), T-cell acute Lymphoid Leukemia (TALL), acute lymphoid leukemia (ALL); one or more chronic leukemias including but not limited to, e.g., chronic myelogenous leukemia (CML), Chronic Lymphoid Leukemia (CLL). Additional cancers or hematologic conditions associated with expression of CD19 comprise, but are not limited to, e.g., B cell prolymphocytic leukemia, blastic plasmacytoid dendritic cell neoplasm, Burkitt's lymphoma, diffuse large B cell lymphoma, Follicular lymphoma, Hairy cell leukemia, small cell- or a large cell-follicular lymphoma, malignant lymphoproliferative conditions, MALT lymphoma, mantle cell lymphoma (MCL), Marginal zone lymphoma, multiple myeloma, myelodysplasia and myelodysplastic syndrome, non-Hodgkin lymphoma, Hodgkin lymphoma, plasmablastic lymphoma, plasmacytoid dendritic cell neoplasm, Waldenstrom macroglobulinemia, and “preleukemia” which are a diverse collection of hematological conditions united by ineffective production (or dysplasia) of myeloid blood cells, and the like. Further diseases associated with expression of a target CAR, e.g., a CD19 CAR, include, but are not limited to, e.g., atypical and/or non-classical cancers, malignancies, precancerous conditions or proliferative diseases. Non-cancer related indications associated with expression of a target CAR, e.g., a CD19 CAR, include, but are not limited to, e.g., immune-related disorder, e.g., B cell aplasia; autoimmune disease, (e.g., lupus); inflammatory disorders (allergy and asthma) and transplantation.

[0228] The term “conservative sequence modifications” refers to amino acid modifications that do not significantly affect or alter the binding characteristics of the antibody or antibody fragment containing the amino acid sequence. Such conservative modifications include amino acid substitutions, additions and deletions. Modifications can be introduced into an antibody or antibody fragment of the invention by standard techniques known in the art, such as site-directed mutagenesis and PCR-mediated mutagenesis. Conservative amino acid substitutions are ones in which the amino acid residue is replaced with an amino acid residue having a similar side chain. Families of amino acid residues having similar side chains have been defined in the art. These families include amino acids with basic side chains (e.g., lysine, arginine, histidine), acidic side chains (e.g., aspartic acid, glutamic acid), uncharged polar side chains (e.g., glycine, asparagine, glutamine, serine, threonine, tyrosine, cysteine, tryptophan), nonpolar side chains (e.g., alanine, valine, leucine, isoleucine, proline, phenylalanine, methionine), beta-branched side chains (e.g., threonine, valine, isoleucine) and aromatic side chains (e.g., tyrosine, phenylalanine, tryptophan, histidine). Thus, one or more amino acid residues within a CAR of the invention can be replaced with other amino acid residues from the same side chain family and the altered CAR can be tested using the functional assays described herein.

[0229] The term “stimulation,” refers to a primary response induced by binding of a stimulatory molecule (e.g., a TCR/CD3 complex or CAR) with its cognate ligand (or tumor antigen in the case of a CAR) thereby mediating a signal transduction event, such as, but not limited to, signal transduction via the TCR/CD3 complex or signal transduction via the appropriate NK receptor or signaling domains of the CAR. Stimulation can mediate altered expression of certain molecules.

[0230] The term “stimulatory molecule,” refers to a molecule expressed by an immune cell (e.g., T cell, NK cell, B cell) that provides the cytoplasmic signaling sequence(s) that regulate activation of the immune cell in a stimulatory way for at least some aspect of the immune cell signaling pathway. In one aspect, the signal is a primary signal that is initiated by, for instance, binding of a TCR/CD3 complex with an MHC molecule loaded with peptide, and which leads to mediation of a T cell response, including, but not limited to, proliferation, activation, differentiation, and the like. A primary cytoplasmic signaling sequence (also referred to as a “primary signaling domain”) that acts in a stimulatory manner may contain a signaling motif which is known as immunoreceptor tyrosine-based activation motif or ITAM. Examples of an ITAM containing cytoplasmic signaling sequence that is of particular use in the invention includes, but is not limited to, those derived from CD3 zeta, common FcR gamma (FCER1G), Fc gamma RIIa, FcR beta (Fc Epsilon R1b), CD3 gamma, CD3 delta, CD3 epsilon, CD79a, CD79b, DAP10, and DAP12. In a specific CAR of the invention, the intracellular signaling domain in any one or more CARS of the invention comprises an intracellular signaling sequence, e.g., a primary signaling sequence of CD3-zeta. In a specific CAR of the invention, the primary signaling sequence of CD3-zeta is the sequence provided as SEQ ID NO:18, or the equivalent residues from a non-human species, e.g., mouse, rodent, monkey, ape and the like. In a specific CAR of the invention, the primary signaling sequence of CD3-zeta is the sequence as provided in SEQ ID NO:20, or the equivalent residues from a non-human species, e.g., mouse, rodent, monkey, ape and the like.

[0231] The term “antigen presenting cell” or “APC” refers to an immune system cell such as an accessory cell (e.g., a B-cell, a dendritic cell, and the like) that displays a foreign antigen complexed with major histocompatibility complexes (MHC's) on its surface. T-cells may recognize these complexes using their T-cell receptors (TCRs). APCs process antigens and present them to T-cells.

[0232] An “intracellular signaling domain,” as the term is used herein, refers to an intracellular portion of a molecule. The intracellular signaling domain generates a signal that promotes an immune effector function of the CAR containing cell, e.g., a CART cell. Examples of immune effector function, e.g., in a CART cell, include cytolytic activity and helper activity, including the secretion of cytokines.

[0233] In an embodiment, the intracellular signaling domain can comprise a primary intracellular signaling domain. Exemplary primary intracellular signaling domains include those derived from the molecules responsible for primary stimulation, or antigen dependent simulation. In an embodiment, the intracellular signaling domain can comprise a costimulatory intracellular domain. Exemplary costimulatory intracellular signaling domains include those derived from molecules responsible for costimulatory signals, or antigen independent stimulation. For example, in the case of a CART, a primary intracellular signaling domain can comprise a cytoplasmic sequence of a T cell receptor, and a costimulatory intracellular signaling domain can comprise cytoplasmic sequence from co-receptor or costimulatory molecule.

[0234] A primary intracellular signaling domain can comprise a signaling motif which is known as an immunoreceptor tyrosine-based activation motif or ITAM. Examples of ITAM containing primary cytoplasmic signaling sequences include, but are not limited to, those derived from CD3 zeta, common FcR gamma (FCER1G), Fc gamma RIIa, FcR beta (Fc Epsilon R1b), CD3 gamma, CD3 delta, CD3 epsilon, CD79a, CD79b, DAP10, and DAP12.

[0235] The term “zeta” or alternatively “zeta chain”, “CD3-zeta” or “TCR-zeta” is defined as the protein provided as GenBank Acc. No. BAG36664.1, or the equivalent residues from a non-human species, e.g., mouse, rodent, monkey, ape and the like, and a “zeta stimulatory domain” or alternatively a “CD3-zeta stimulatory domain” or a “TCR-zeta stimulatory domain” is defined as the amino acid residues from the cytoplasmic domain of the zeta chain, or functional derivatives thereof, that are sufficient to functionally transmit an initial signal necessary for T cell activation. In one aspect the cytoplasmic domain of zeta comprises residues 52 through 164 of GenBank Acc. No. BAG36664.1 or the equivalent residues from a non-human species, e.g., mouse, rodent, monkey, ape and the like, that are functional orthologs thereof. In one aspect, the “zeta stimulatory domain” or a “CD3-zeta stimulatory domain” is the sequence provided as SEQ ID NO:18. In one aspect, the “zeta stimulatory domain” or a “CD3-zeta stimulatory domain” is the sequence provided as SEQ ID NO: 20.

[0236] The term a “costimulatory molecule” refers to a cognate binding partner on a T cell that specifically binds with a costimulatory ligand, thereby mediating a costimulatory response by the T cell, such as, but not limited to, proliferation. Costimulatory molecules are cell surface molecules other than antigen receptors or their ligands that are contribute to an efficient immune response. Costimulatory molecules include, but are not limited to an MHC class I molecule, BTLA and a Toll ligand receptor, as well as OX40, CD27, CD28, CDS, ICAM-1, LFA-1 (CD11a/CD18), ICOS (CD278), and 4-1BB (CD137). Further examples of such costimulatory molecules include CDS, ICAM-1, GITR, BAFFR, HVEM (LIGHTR), SLAMF7, NKp80 (KLRF1), NKp44, NKp30, NKp46, CD160, CD19, CD4, CD8alpha, CD8beta, IL2R beta, IL2R gamma, IL7R alpha, ITGA4, VLA1, CD49a, ITGA4, IA4, CD49D, ITGA6, VLA-6, CD49f, ITGAD, CD11d, ITGAE, CD103, ITGAL, CD11a, LFA-1, ITGAM, CD11b, ITGAX, CD11c, ITGB1, CD29, ITGB2, CD18, LFA-1, ITGB7, NKG2D, NKG2C, TNFR2, TRANCE/RANKL, DNAMI (CD226), SLAMF4 (CD244, 2B4), CD84, CD96 (Tactile), CEACAMI, CRTAM, Ly9 (CD229), CD160 (BY55), PSGL1, CD100 (SEMA4D), CD69, SLAMF6 (NTB-A, Ly108), SLAM (SLAMF1, CD150, IPO-3), BLAME (SLAMF8), SELPLG (CD162), LTBR, LAT, GADS, SLP-76, PAG/Cbp, CD19a, and a ligand that specifically binds with CD83.

[0237] A costimulatory intracellular signaling domain can be the intracellular portion of a costimulatory molecule. A costimulatory molecule can be represented in the following protein families: TNF receptor proteins, Immunoglobulin-like proteins, cytokine receptors, integrins, signaling lymphocytic activation molecules (SLAM proteins), and activating NK cell receptors. Examples of such molecules include CD27, CD28, 4-1BB (CD137), OX40, GITR, CD30, CD40, ICOS, BAFFR, HVEM, ICAM-1, lymphocyte function-associated antigen-1 (LFA-1), CD2, CDS, CD7, CD287, LIGHT, NKG2C, NKG2D, SLAMF7, NKp80, NKp30, NKp44, NKp46, CD160, B7-H3, and a ligand that specifically binds with CD83, and the like.

[0238] The intracellular signaling domain can comprise the entire intracellular portion, or the entire native intracellular signaling domain, of the molecule from which it is derived, or a functional fragment or derivative thereof.

[0239] The term “4-1BB” refers to a member of the TNFR superfamily with an amino acid sequence provided as GenBank Acc. No. AAA62478.2, or the equivalent residues from a non-human species, e.g., mouse, rodent, monkey, ape and the like; and a “4-1BB costimulatory domain” is defined as amino acid residues 214-255 of GenBank Acc. No. AAA62478.2, or the equivalent residues from a non-human species, e.g., mouse, rodent, monkey, ape and the like. In one aspect, the “4-1BB costimulatory domain” is the sequence provided as SEQ ID NO:14 or the equivalent residues from a non-human species, e.g., mouse, rodent, monkey, ape and the like.

[0240] “Immune effector cell,” as that term is used herein, refers to a cell that is involved in an immune response, e.g., in the promotion of an immune effector response. Examples of immune effector cells include T cells, e.g., alpha/beta T cells and gamma/delta T cells, B cells, natural killer (NK) cells, natural killer T (NKT) cells, mast cells, and myeloid-derived phagocytes.

[0241] “Immune effector function or immune effector response,” as that term is used herein, refers to function or response, e.g., of an immune effector cell, that enhances or promotes an immune attack of a target cell. E.g., an immune effector function or response refers a property of a T or NK cell that promotes killing or the inhibition of growth or proliferation, of a target cell. In the case of a T cell, primary stimulation and co-stimulation are examples of immune effector function or response.

[0242] The term “encoding” refers to the inherent property of specific sequences of nucleotides in a polynucleotide, such as a gene, a cDNA, or an mRNA, to serve as templates for synthesis of other polymers and macromolecules in biological processes having either a defined sequence of nucleotides (e.g., rRNA, tRNA and mRNA) or a defined sequence of amino acids and the biological properties resulting therefrom. Thus, a gene, cDNA, or RNA, encodes a protein if transcription and translation of mRNA corresponding to that gene produces the protein in a cell or other biological system. Both the coding strand, the nucleotide sequence of which is identical to the mRNA sequence and is usually provided in sequence listings, and the non-coding strand, used as the template for transcription of a gene or cDNA, can be referred to as encoding the protein or other product of that gene or cDNA.

[0243] Unless otherwise specified, a “nucleotide sequence encoding an amino acid sequence” includes all nucleotide sequences that are degenerate versions of each other and that encode the same amino acid sequence. The phrase nucleotide sequence that encodes a protein or a RNA may also include introns to the extent that the nucleotide sequence encoding the protein may in some version contain an intron(s).

[0244] The term “effective amount” or “therapeutically effective amount” are used interchangeably herein, and refer to an amount of a compound, formulation, material, or composition, as described herein effective to achieve a particular biological result.

[0245] The term “endogenous” refers to any material from or produced inside an organism, cell, tissue or system.

[0246] The term “exogenous” refers to any material introduced from or produced outside an organism, cell, tissue or system.

[0247] The term “expression” refers to the transcription and/or translation of a particular nucleotide sequence driven by a promoter.

[0248] The term “transfer vector” refers to a composition of matter which comprises an isolated nucleic acid and which can be used to deliver the isolated nucleic acid to the interior of a cell. Numerous vectors are known in the art including, but not limited to, linear polynucleotides, polynucleotides associated with ionic or amphiphilic compounds, plasmids, and viruses. Thus, the term “transfer vector” includes an autonomously replicating plasmid or a virus. The term should also be construed to further include non-plasmid and non-viral compounds which facilitate transfer of nucleic acid into cells, such as, for example, a polylysine compound, liposome, and the like. Examples of viral transfer vectors include, but are not limited to, adenoviral vectors, adeno-associated virus vectors, retroviral vectors, lentiviral vectors, and the like.

[0249] The term “expression vector” refers to a vector comprising a recombinant polynucleotide comprising expression control sequences operatively linked to a nucleotide sequence to be expressed. An expression vector comprises sufficient cis-acting elements for expression; other elements for expression can be supplied by the host cell or in an in vitro expression system. Expression vectors include all those known in the art, including cosmids, plasmids (e.g., naked or contained in liposomes) and viruses (e.g., lentiviruses, retroviruses, adenoviruses, and adeno-associated viruses) that incorporate the recombinant polynucleotide.

[0250] The term “lentivirus” refers to a genus of the Retroviridae family. Lentiviruses are unique among the retroviruses in being able to infect non-dividing cells; they can deliver a significant amount of genetic information into the DNA of the host cell, so they are one of the most efficient methods of a gene delivery vector. HIV, SIV, and FIV are all examples of lentiviruses.

[0251] The term “lentiviral vector” refers to a vector derived from at least a portion of a lentivirus genome, including especially a self-inactivating lentiviral vector as provided in Milone et al., Mol. Ther. 17 (8): 1453-1464 (2009). Other examples of lentivirus vectors that may be used in the clinic, include but are not limited to, e.g., the LENTIVECTOR® gene delivery technology from Oxford BioMedica, the LENTIMAX™ vector system from Lentigen and the like. Nonclinical types of lentiviral vectors are also available and would be known to one skilled in the art.

[0252] The term “homologous” or “identity” refers to the subunit sequence identity between two polymeric molecules, e.g., between two nucleic acid molecules, such as, two DNA molecules or two RNA molecules, or between two polypeptide molecules. When a subunit position in both of the two molecules is occupied by the same monomeric subunit; e.g., if a position in each of two DNA molecules is occupied by adenine, then they are homologous or identical at that position. The homology between two sequences is a direct function of the number of matching or homologous positions; e.g., if half (e.g., five positions in a polymer ten subunits in length) of the positions in two sequences are homologous, the two sequences are 50% homologous; if 90% of the positions (e.g., 9 of 10), are matched or homologous, the two sequences are 90% homologous.

[0253] “Humanized” forms of non-human (e.g., murine) antibodies are chimeric immunoglobulins, immunoglobulin chains or fragments thereof (such as Fv, Fab, Fab′, F (ab′) 2 or other antigen-binding subsequences of antibodies) which contain minimal sequence derived from non-human immunoglobulin. For the most part, humanized antibodies and antibody fragments thereof are human immunoglobulins (recipient antibody or antibody fragment) in which residues from a complementary-determining region (CDR) of the recipient are replaced by residues from a CDR of a non-human species (donor antibody) such as mouse, rat or rabbit having the desired specificity, affinity, and capacity. In some instances, Fv framework region (FR) residues of the human immunoglobulin are replaced by corresponding non-human residues. Furthermore, a humanized antibody/antibody fragment can comprise residues which are found neither in the recipient antibody nor in the imported CDR or framework sequences. These modifications can further refine and optimize antibody or antibody fragment performance. In general, the humanized antibody or antibody fragment thereof will comprise substantially all of at least one, and typically two, variable domains, in which all or substantially all of the CDR regions correspond to those of a non-human immunoglobulin and all or a significant portion of the FR regions are those of a human immunoglobulin sequence. The humanized antibody or antibody fragment can also comprise at least a portion of an immunoglobulin constant region (Fc), typically that of a human immunoglobulin. For further details, see Jones et al., Nature, 321:522-525, 1986; Reichmann et al., Nature, 332:323-329, 1988; Presta, Curr. Op. Struct. Biol., 2:593-596, 1992.

[0254] “Fully human” refers to an immunoglobulin, such as an antibody or antibody fragment, where the whole molecule is of human origin or consists of an amino acid sequence identical to a human form of the antibody or immunoglobulin.

[0255] The term “isolated” means altered or removed from the natural state. For example, a nucleic acid or a peptide naturally present in a living animal is not “isolated,” but the same nucleic acid or peptide partially or completely separated from the coexisting materials of its natural state is “isolated.” An isolated nucleic acid or protein can exist in substantially purified form, or can exist in a non-native environment such as, for example, a host cell.

[0256] In the context of the present invention, the following abbreviations for the commonly occurring nucleic acid bases are used. “A” refers to adenosine, “C” refers to cytosine, “G” refers to guanosine, “T” refers to thymidine, and “U” refers to uridine.

[0257] The term “operably linked” or “transcriptional control” refers to functional linkage between a regulatory sequence and a heterologous nucleic acid sequence resulting in expression of the latter. For example, a first nucleic acid sequence is operably linked with a second nucleic acid sequence when the first nucleic acid sequence is placed in a functional relationship with the second nucleic acid sequence. For instance, a promoter is operably linked to a coding sequence if the promoter affects the transcription or expression of the coding sequence. Operably linked DNA sequences can be contiguous with each other and, e.g., where necessary to join two protein coding regions, are in the same reading frame.

[0258] The term “parenteral” administration of an immunogenic composition includes, e.g., subcutaneous (s.c.), intravenous (i.v.), intramuscular (i.m.), or intrasternal injection, intratumoral, or infusion techniques.

[0259] The term “nucleic acid” or “polynucleotide” refers to deoxyribonucleic acids (DNA) or ribonucleic acids (RNA) and polymers thereof in either single- or double-stranded form. Unless specifically limited, the term encompasses nucleic acids containing known analogues of natural nucleotides that have similar binding properties as the reference nucleic acid and are metabolized in a manner similar to naturally occurring nucleotides. Unless otherwise indicated, a particular nucleic acid sequence also implicitly encompasses conservatively modified variants thereof (e.g., degenerate codon substitutions), alleles, orthologs, SNPs, and complementary sequences as well as the sequence explicitly indicated. Specifically, degenerate codon substitutions may be achieved by generating sequences in which the third position of one or more selected (or all) codons is substituted with mixed-base and/or deoxyinosine residues (Batzer et al., Nucleic Acid Res. 19:5081 (1991); Ohtsuka et al., J. Biol. Chem. 260:2605-2608 (1985); and Rossolini et al., Mol. Cell. Probes 8:91-98 (1994)).

[0260] The terms “peptide,” “polypeptide,” and “protein” are used interchangeably, and refer to a compound comprised of amino acid residues covalently linked by peptide bonds. A protein or peptide must contain at least two amino acids, and no limitation is placed on the maximum number of amino acids that can comprise a protein's or peptide's sequence. Polypeptides include any peptide or protein comprising two or more amino acids joined to each other by peptide bonds. As used herein, the term refers to both short chains, which also commonly are referred to in the art as peptides, oligopeptides and oligomers, for example, and to longer chains, which generally are referred to in the art as proteins, of which there are many types. “Polypeptides” include, for example, biologically active fragments, substantially homologous polypeptides, oligopeptides, homodimers, heterodimers, variants of polypeptides, modified polypeptides, derivatives, analogs, fusion proteins, among others. A polypeptide includes a natural peptide, a recombinant peptide, or a combination thereof.

[0261] The term “promoter” refers to a DNA sequence recognized by the synthetic machinery of the cell, or introduced synthetic machinery, required to initiate the specific transcription of a polynucleotide sequence.

[0262] The term “promoter/regulatory sequence” refers to a nucleic acid sequence which is required for expression of a gene product operably linked to the promoter/regulatory sequence. In some instances, this sequence may be the core promoter sequence and in other instances, this sequence may also include an enhancer sequence and other regulatory elements which are required for expression of the gene product. The promoter/regulatory sequence may, for example, be one which expresses the gene product in a tissue specific manner.

[0263] The term “constitutive” promoter refers to a nucleotide sequence which, when operably linked with a polynucleotide which encodes or specifies a gene product, causes the gene product to be produced in a cell under most or all physiological conditions of the cell.

[0264] The term “inducible” promoter refers to a nucleotide sequence which, when operably linked with a polynucleotide which encodes or specifies a gene product, causes the gene product to be produced in a cell substantially only when an inducer which corresponds to the promoter is present in the cell.

[0265] The term “tissue-specific” promoter refers to a nucleotide sequence which, when operably linked with a polynucleotide encodes or specified by a gene, causes the gene product to be produced in a cell substantially only if the cell is a cell of the tissue type corresponding to the promoter.

[0266] The terms “cancer associated antigen” or “tumor antigen” interchangeably refers to a molecule (typically a protein, carbohydrate or lipid) that is expressed on the surface of a cancer cell, either entirely or as a fragment (e.g., MHC/peptide), and which is useful for the preferential targeting of a pharmacological agent to the cancer cell. In some embodiments, a tumor antigen is a marker expressed by both normal cells and cancer cells, e.g., a lineage marker, e.g., CD19 on B cells. In some embodiments, a tumor antigen is a cell surface molecule that is overexpressed in a cancer cell in comparison to a normal cell, for instance, 1-fold over expression, 2-fold overexpression, 3-fold overexpression or more in comparison to a normal cell. In some embodiments, a tumor antigen is a cell surface molecule that is inappropriately synthesized in the cancer cell, for instance, a molecule that contains deletions, additions or mutations in comparison to the molecule expressed on a normal cell. In some embodiments, a tumor antigen will be expressed exclusively on the cell surface of a cancer cell, entirely or as a fragment (e.g., MHC/peptide), and not synthesized or expressed on the surface of a normal cell. In some embodiments, the CARs of the present invention includes CARs comprising an antigen binding domain (e.g., antibody or antibody fragment) that binds to a MHC presented peptide. Normally, peptides derived from endogenous proteins fill the pockets of Major histocompatibility complex (MHC) class I molecules, and are recognized by T cell receptors (TCRs) on CD8+ T lymphocytes. The MHC class I complexes are constitutively expressed by all nucleated cells. In cancer, virus-specific and/or tumor-specific peptide/MHC complexes represent a unique class of cell surface targets for immunotherapy. TCR-like antibodies targeting peptides derived from viral or tumor antigens in the context of human leukocyte antigen (HLA)-A1 or HLA-A2 have been described (see, e.g., Sastry et al., J Virol. 2011 85 (5): 1935-1942; Sergeeva et al., Blood, 2011 117 (16): 4262-4272; Verma et al., J Immunol 2010 184 (4): 2156-2165; Willemsen et al., Gene Ther 2001 8 (21): 1601-1608; Dao et al., Sci Transl Med 2013 5 (176): 176ra33; Tassev et al., Cancer Gene Ther 2012 19 (2): 84-100). For example, TCR-like antibody can be identified from screening a library, such as a human scFv phage displayed library.

[0267] The term “tumor-supporting antigen” or “cancer-supporting antigen” interchangeably refer to a molecule (typically a protein, carbohydrate or lipid) that is expressed on the surface of a cell that is, itself, not cancerous, but supports the cancer cells, e.g., by promoting their growth or survival e.g., resistance to immune cells. Exemplary cells of this type include stromal cells and myeloid-derived suppressor cells (MDSCs). The tumor-supporting antigen itself need not play a role in supporting the tumor cells so long as the antigen is present on a cell that supports cancer cells.

[0268] The term “flexible polypeptide linker” or “linker” as used in the context of a scFv refers to a peptide linker that consists of amino acids such as glycine and/or serine residues used alone or in combination, to link variable heavy and variable light chain regions together. In one embodiment, the flexible polypeptide linker is a Gly/Ser linker and comprises the amino acid sequence (Gly-Gly-Gly-Ser)ₙ, where n is a positive integer equal to or greater than 1. For example, n=1, n=2, n=3. n=4, n=5 and n=6, n=7, n=8, n=9 and n=10 (SEQ ID NO:28). In one embodiment, the flexible polypeptide linkers include, but are not limited to, (Gly4 Ser) 4 (SEQ ID NO:29) or (Gly4 Ser) 3 (SEQ ID NO:30). In another embodiment, the linkers include multiple repeats of (Gly2Ser), (GlySer) or (Gly3Ser) (SEQ ID NO: 31). Also included within the scope of the invention are linkers described in WO2012/138475, incorporated herein by reference).

[0269] As used herein, a 5′ cap (also termed an RNA cap, an RNA 7-methylguanosine cap or an RNA m⁷G cap) is a modified guanine nucleotide that has been added to the “front” or 5′ end of a eukaryotic messenger RNA shortly after the start of transcription. The 5′ cap consists of a terminal group which is linked to the first transcribed nucleotide. Its presence is critical for recognition by the ribosome and protection from RNases. Cap addition is coupled to transcription, and occurs co-transcriptionally, such that each influences the other. Shortly after the start of transcription, the 5′ end of the mRNA being synthesized is bound by a cap-synthesizing complex associated with RNA polymerase. This enzymatic complex catalyzes the chemical reactions that are required for mRNA capping. Synthesis proceeds as a multi-step biochemical reaction. The capping moiety can be modified to modulate functionality of mRNA such as its stability or efficiency of translation.

[0270] As used herein, “in vitro transcribed RNA” refers to RNA, preferably mRNA, that has been synthesized in vitro. Generally, the in vitro transcribed RNA is generated from an in vitro transcription vector. The in vitro transcription vector comprises a template that is used to generate the in vitro transcribed RNA.

[0271] As used herein, a “poly (A)” is a series of adenosines attached by polyadenylation to the mRNA. In the preferred embodiment of a construct for transient expression, the polyA is between 50 and 5000 (SEQ ID NO: 34), preferably greater than 64, more preferably greater than 100, most preferably greater than 300 or 400. poly (A) sequences can be modified chemically or enzymatically to modulate mRNA functionality such as localization, stability or efficiency of translation.

[0272] As used herein, “polyadenylation” refers to the covalent linkage of a polyadenylyl moiety, or its modified variant, to a messenger RNA molecule. In eukaryotic organisms, most messenger RNA (mRNA) molecules are polyadenylated at the 3′ end. The 3′ poly (A) tail is a long sequence of adenine nucleotides (often several hundred) added to the pre-mRNA through the action of an enzyme, polyadenylate polymerase. In higher eukaryotes, the poly (A) tail is added onto transcripts that contain a specific sequence, the polyadenylation signal. The poly (A) tail and the protein bound to it aid in protecting mRNA from degradation by exonucleases. Polyadenylation is also important for transcription termination, export of the mRNA from the nucleus, and translation. Polyadenylation occurs in the nucleus immediately after transcription of DNA into RNA, but additionally can also occur later in the cytoplasm. After transcription has been terminated, the mRNA chain is cleaved through the action of an endonuclease complex associated with RNA polymerase. The cleavage site is usually characterized by the presence of the base sequence AAUAAA near the cleavage site. After the mRNA has been cleaved, adenosine residues are added to the free 3′ end at the cleavage site.

[0273] As used herein, “transient” refers to expression of a non-integrated transgene for a period of hours, days or weeks, wherein the period of time of expression is less than the period of time for expression of the gene if integrated into the genome or contained within a stable plasmid replicon in the host cell.

[0274] As used herein, the terms “treat”, “treatment” and “treating” refer to the reduction or amelioration of the progression, severity and/or duration of a proliferative disorder, or the amelioration of one or more symptoms (preferably, one or more discernible symptoms) of a proliferative disorder resulting from the administration of one or more therapies (e.g., one or more therapeutic agents such as a CAR of the invention). In specific embodiments, the terms “treat”, “treatment” and “treating” refer to the amelioration of at least one measurable physical parameter of a proliferative disorder, such as growth of a tumor, not necessarily discernible by the patient. In other embodiments the terms “treat”, “treatment” and “treating”-refer to the inhibition of the progression of a proliferative disorder, either physically by, e.g., stabilization of a discernible symptom, physiologically by, e.g., stabilization of a physical parameter, or both. In other embodiments the terms “treat”, “treatment” and “treating” refer to the reduction or stabilization of tumor size or cancerous cell count.

[0275] The term “signal transduction pathway” refers to the biochemical relationship between a variety of signal transduction molecules that play a role in the transmission of a signal from one portion of a cell to another portion of a cell. The phrase “cell surface receptor” includes molecules and complexes of molecules capable of receiving a signal and transmitting signal across the membrane of a cell.

[0276] The term “subject” is intended to include living organisms in which an immune response can be elicited (e.g., mammals, human).

[0277] The term, a “substantially purified” cell refers to a cell that is essentially free of other cell types. A substantially purified cell also refers to a cell which has been separated from other cell types with which it is normally associated in its naturally occurring state. In some instances, a population of substantially purified cells refers to a homogenous population of cells. In other instances, this term refers simply to cell that have been separated from the cells with which they are naturally associated in their natural state. In some aspects, the cells are cultured in vitro. In other aspects, the cells are not cultured in vitro.

[0278] The term “therapeutic” as used herein means a treatment. A therapeutic effect is obtained by reduction, suppression, remission, or eradication of a disease state.

[0279] The term “prophylaxis” as used herein means the prevention of or protective treatment for a disease or disease state.

[0280] In the context of the present invention, “tumor antigen” or “hyperproliferative disorder antigen” or “antigen associated with a hyperproliferative disorder” refers to antigens that are common to specific hyperproliferative disorders. In certain aspects, the hyperproliferative disorder antigens of the present invention are derived from, cancers including but not limited to primary or metastatic melanoma, thymoma, lymphoma, sarcoma, lung cancer, liver cancer, non-Hodgkin lymphoma, Hodgkin lymphoma, leukemias, uterine cancer, cervical cancer, bladder cancer, kidney cancer and adenocarcinomas such as breast cancer, prostate cancer, ovarian cancer, pancreatic cancer, and the like.

[0281] The term “transfected” or “transformed” or “transduced” refers to a process by which exogenous nucleic acid is transferred or introduced into the host cell. A “transfected” or “transformed” or “transduced” cell is one which has been transfected, transformed or transduced with exogenous nucleic acid. The cell includes the primary subject cell and its progeny.

[0282] The term “specifically binds,” refers to an antibody, or a ligand, which recognizes and binds with a binding partner (e.g., a tumor antigen) protein present in a sample, but which antibody or ligand does not substantially recognize or bind other molecules in the sample.

[0283] “Regulatable chimeric antigen receptor (RCAR),” as that term is used herein, refers to a set of polypeptides, typically two in the simplest embodiments, which when in a RCARX cell, provides the RCARX cell with specificity for a target cell, typically a cancer cell, and with regulatable intracellular signal generation or proliferation, which can optimize an immune effector property of the RCARX cell. An RCARX cell relies at least in part, on an antigen binding domain to provide specificity to a target cell that comprises the antigen bound by the antigen binding domain. In an embodiment, an RCAR includes a dimerization switch that, upon the presence of a dimerization molecule, can couple an intracellular signaling domain to the antigen binding domain.

[0284] “Membrane anchor” or “membrane tethering domain”, as that term is used herein, refers to a polypeptide or moiety, e.g., a myristoyl group, sufficient to anchor an extracellular or intracellular domain to the plasma membrane.

[0285] “Switch domain,” as that term is used herein, e.g., when referring to an RCAR, refers to an entity, typically a polypeptide-based entity, that, in the presence of a dimerization molecule, associates with another switch domain. The association results in a functional coupling of a first entity linked to, e.g., fused to, a first switch domain, and a second entity linked to, e.g., fused to, a second switch domain. A first and second switch domain are collectively referred to as a dimerization switch. In embodiments, the first and second switch domains are the same as one another, e.g., they are polypeptides having the same primary amino acid sequence, and are referred to collectively as a homodimerization switch. In embodiments, the first and second switch domains are different from one another, e.g., they are polypeptides having different primary amino acid sequences, and are referred to collectively as a heterodimerization switch. In embodiments, the switch is intracellular. In embodiments, the switch is extracellular. In embodiments, the switch domain is a polypeptide-based entity, e.g., FKBP or FRB-based, and the dimerization molecule is small molecule, e.g., a rapalogue. In embodiments, the switch domain is a polypeptide-based entity, e.g., an scFv that binds a myc peptide, and the dimerization molecule is a polypeptide, a fragment thereof, or a multimer of a polypeptide, e.g., a myc ligand or multimers of a myc ligand that bind to one or more myc scFvs. In embodiments, the switch domain is a polypeptide-based entity, e.g., myc receptor, and the dimerization molecule is an antibody or fragments thereof, e.g., myc antibody.

[0286] “Dimerization molecule,” as that term is used herein, e.g., when referring to an RCAR, refers to a molecule that promotes the association of a first switch domain with a second switch domain. In embodiments, the dimerization molecule does not naturally occur in the subject, or does not occur in concentrations that would result in significant dimerization. In embodiments, the dimerization molecule is a small molecule, e.g., rapamycin or a rapalogue, e.g., RAD001.

[0287] The term “bioequivalent” refers to an amount of an agent other than the reference compound (e.g., RAD001), required to produce an effect equivalent to the effect produced by the reference dose or reference amount of the reference compound (e.g., RAD001). In an embodiment the effect is the level of mTOR inhibition, e.g., as measured by P70 S6 kinase inhibition, e.g., as evaluated in an in vivo or in vitro assay, e.g., as measured by an assay described herein, e.g., the Boulay assay. In an embodiment, the effect is alteration of the ratio of PD-1 positive/PD-1 negative T cells, as measured by cell sorting. In an embodiment a bioequivalent amount or dose of an mTOR inhibitor is the amount or dose that achieves the same level of P70 S6 kinase inhibition as does the reference dose or reference amount of a reference compound. In an embodiment, a bioequivalent amount or dose of an mTOR inhibitor is the amount or dose that achieves the same level of alteration in the ratio of PD-1 positive/PD-1 negative T cells as does the reference dose or reference amount of a reference compound.

[0288] The term “low, immune enhancing, dose” when used in conjunction with an mTOR inhibitor, e.g., an allosteric mTOR inhibitor, e.g., RAD001 or rapamycin, or a catalytic mTOR inhibitor, refers to a dose of mTOR inhibitor that partially, but not fully, inhibits mTOR activity, e.g., as measured by the inhibition of P70 S6 kinase activity. Methods for evaluating mTOR activity, e.g., by inhibition of P70 S6 kinase, are discussed herein. The dose is insufficient to result in complete immune suppression but is sufficient to enhance the immune response. In an embodiment, the low, immune enhancing, dose of mTOR inhibitor results in a decrease in the number of PD-1 positive T cells and/or an increase in the number of PD-1 negative T cells, or an increase in the ratio of PD-1 negative T cells/PD-1 positive T cells. In an embodiment, the low, immune enhancing, dose of mTOR inhibitor results in an increase in the number of naive T cells. In an embodiment, the low, immune enhancing, dose of mTOR inhibitor results in one or more of the following:
[0289] an increase in the expression of one or more of the following markers: CD62L^{high}, CD127^{high}, CD27⁺, and BCL2, e.g., on memory T cells, e.g., memory T cell precursors;
[0290] a decrease in the expression of KLRG1, e.g., on memory T cells, e.g., memory T cell precursors; and
[0291] an increase in the number of memory T cell precursors, e.g., cells with any one or combination of the following characteristics: increased CD62L^{high}, increased CD127^{high}, increased CD27⁺, decreased KLRG1, and increased BCL2;
[0292] wherein any of the changes described above occurs, e.g., at least transiently, e.g., as compared to a non-treated subject.

[0293] “Refractory” as used herein refers to a disease, e.g., cancer, that does not respond to a treatment. In embodiments, a refractory cancer can be resistant to a treatment before or at the beginning of the treatment. In other embodiments, the refractory cancer can become resistant during a treatment. A refractory cancer is also called a resistant cancer.

[0294] “Relapsed” as used herein refers to the return of a disease (e.g., cancer) or the signs and symptoms of a disease such as cancer after a period of improvement, e.g., after prior treatment of a therapy, e.g., cancer therapy

[0295] Ranges: throughout this disclosure, various aspects of the invention can be presented in a range format. It should be understood that the description in range format is merely for convenience and brevity and should not be construed as an inflexible limitation on the scope of the invention. Accordingly, the description of a range should be considered to have specifically disclosed all the possible subranges as well as individual numerical values within that range. For example, description of a range such as from 1 to 6 should be considered to have specifically disclosed subranges such as from 1 to 3, from 1 to 4, from 1 to 5, from 2 to 4, from 2 to 6, from 3 to 6 etc., as well as individual numbers within that range, for example, 1, 2, 2.7, 3, 4, 5, 5.3, and 6. As another example, a range such as 95-99% identity, includes something with 95%, 96%, 97%, 98% or 99% identity, and includes subranges such as 96-99%, 96-98%, 96-97%, 97-99%, 97-98% and 98-99% identity. This applies regardless of the breadth of the range.

### DESCRIPTION

[0296] Provided herein are compositions of matter and methods of use for the treatment of a disease associated with expression of a target CAR using immune effector cells (e.g., T cells, NK cells) engineered with anti-target CARs of the invention.

[0297] In one aspect, the invention provides a number of chimeric antigen receptors (CAR) comprising an antigen binding domain (e.g., antibody or antibody fragment, TCR or TCR fragment) engineered for specific binding to a tumor antigen, e.g., a tumor antigen described herein. In one aspect, the invention provides an immune effector cell (e.g., T cell, NK cell) engineered to express a CAR, wherein the engineered immune effector cell exhibits an anticancer property. In one aspect, a cell is transformed with the CAR and the CAR is expressed on the cell surface. In some embodiments, the cell (e.g., T cell, NK cell) is transduced with a viral vector encoding a CAR. In some embodiments, the viral vector is a retroviral vector. In some embodiments, the viral vector is a lentiviral vector. In some such embodiments, the cell may stably express the CAR. In another embodiment, the cell (e.g., T cell, NK cell) is transfected with a nucleic acid, e.g., mRNA, cDNA, DNA, encoding a CAR. In some such embodiments, the cell may transiently express the CAR.

[0298] In one aspect, the antigen binding domain of a CAR described herein is a scFv antibody fragment. In one aspect, such antibody fragments are functional in that they retain the equivalent binding affinity, e.g., they bind the same antigen with comparable affinity, as the IgG antibody from which it is derived. In other embodiments, the antibody fragment has a lower binding affinity, e.g., it binds the same antigen with a lower binding affinity than the antibody from which it is derived, but is functional in that it provides a biological response described herein. In one embodiment, the CAR molecule comprises an antibody fragment that has a binding affinity KD of 10-4 M to 10-8 M, e.g., 10-5 M to 10-7 M, e.g., 10-6 M or 10-7 M, for the target antigen. In one embodiment, the antibody fragment has a binding affinity that is at least five-fold, 10-fold, 20-fold, 30-fold, 50-fold, 100-fold or 1,000-fold less than a reference antibody, e.g., an antibody described herein.

[0299] In one aspect such antibody fragments are functional in that they provide a biological response that can include, but is not limited to, activation of an immune response, inhibition of signal-transduction origination from its target antigen, inhibition of kinase activity, and the like, as will be understood by a skilled artisan.

[0300] In one aspect, the antigen binding domain of the CAR is a scFv antibody fragment that is humanized compared to the murine sequence of the scFv from which it is derived.

[0301] In one aspect, the antigen binding domain of a CAR of the invention (e.g., a scFv) is encoded by a nucleic acid molecule whose sequence has been codon optimized for expression in a mammalian cell. In one aspect, entire CAR construct of the invention is encoded by a nucleic acid molecule whose entire sequence has been codon optimized for expression in a mammalian cell. Codon optimization refers to the discovery that the frequency of occurrence of synonymous codons (i.e., codons that code for the same amino acid) in coding DNA is biased in different species. Such codon degeneracy allows an identical polypeptide to be encoded by a variety of nucleotide sequences. A variety of codon optimization methods is known in the art, and include, e.g., methods disclosed in at least U.S. Pat. Nos. 5,786,464 and 6,114,148.

[0302] In one aspect, the CARs of the invention combine an antigen binding domain of a specific antibody with an intracellular signaling molecule. For example, in some aspects, the intracellular signaling molecule includes, but is not limited to, CD3-zeta chain, 4-1BB and CD28 signaling modules and combinations thereof. In one aspect, the antigen binding domain binds to a tumor antigen as described herein.

[0303] Furthermore, the present invention provides CARs and CAR-expressing cells and their use in medicaments or methods for treating, among other diseases, cancer or any malignancy or autoimmune diseases involving cells or tissues which express a tumor antigen as described herein.

[0304] In one aspect, the CAR of the invention can be used to eradicate a normal cell that express a tumor antigen as described herein, thereby applicable for use as a cellular conditioning therapy prior to cell transplantation. In one aspect, the normal cell that expresses a tumor antigen as described herein is a normal stem cell and the cell transplantation is a stem cell transplantation.

[0305] In one aspect, the invention provides an immune effector cell (e.g., T cell, NK cell) engineered to express a chimeric antigen receptor (CAR), wherein the engineered immune effector cell exhibits an antitumor property. A preferred antigen is a cancer associated antigen (i.e., tumor antigen) described herein. In one aspect, the antigen binding domain of the CAR comprises a partially humanized antibody fragment. In one aspect, the antigen binding domain of the CAR comprises a partially humanized scFv. Accordingly, the invention provides CARs that comprises a humanized antigen binding domain and is engineered into a cell, e.g., a T cell or a NK cell, and methods of their use for adoptive therapy.

[0306] In one aspect, the CARs of the invention comprise at least one intracellular domain selected from the group of a CD137 (4-1BB) signaling domain, a CD28 signaling domain, a CD27 signal domain, a CD3zeta signal domain, and any combination thereof. In one aspect, the CARs of the invention comprise at least one intracellular signaling domain is from one or more costimulatory molecule(s) other than a CD137 (4-1BB) or CD28.

[0307] Sequences of some examples of various components of CARs of the instant invention is listed in Table 1, where aa stands for amino acids, and na stands for nucleic acids that encode the corresponding peptide.

TABLE 1
Sequences of various components of CAR (aa—amino acids, na—nucleic acids
that encodes the corresponding protein)

| SEQ | | | Corresp. |
|---|---|---|---|
| ID | | | To |
| NO | description | Sequence | huCD19 |
| 400 | EF-1 | CGTGAGGCTCCGGTGCCCGTCAGTGGGCAGAGCGCAC | 100 |
| | promoter | ATCGCCCACAGTCCCCGAGAAGTTGGGGGGAGGGGTC | |
| | | GGCAATTGAACCGGTGCCTAGAGAAGGTGGCGCGGGG | |
| | | TAAACTGGGAAAGTGATGTCGTGTACTGGCTCCGCCTT | |
| | | TTTCCCGAGGGTGGGGGAGAACCGTATATAAGTGCAG | |
| | | TAGTCGCCGTGAACGTTCTTTTTCGCAACGGGTTTGCC | |
| | | GCCAGAACACAGGTAAGTGCCGTGTGTGGTTCCCGCG | |
| | | GGCCTGGCCTCTTTACGGGTTATGGCCCTTGCGTGCCT | |
| | | TGAATTACTTCCACCTGGCTGCAGTACGTGATTCTTGA | |
| | | TCCCGAGCTTCGGGTTGGAAGTGGGTGGGAGAGTTCG | |
| | | AGGCCTTGCGCTTAAGGAGCCCCTTCGCCTCGTGCTTG | |
| | | AGTTGAGGCCTGGCCTGGGCGCTGGGGCCGCCGCGTG | |
| | | CGAATCTGGTGGCACCTTCGCGCCTGTCTCGCTGCTTT | |
| | | CGATAAGTCTCTAGCCATTTAAAATTTTTGATGACCTG | |
| | | CTGCGACGCTTTTTTTCTGGCAAGATAGTCTTGTAAAT | |
| | | GCGGGCCAAGATCTGCACACTGGTATTTCGGTTTTTGG | |
| | | GGCCGCGGGCGGCGACGGGGCCCGTGCGTCCCAGCGC | |
| | | ACATGTTCGGCGAGGCGGGGCCTGCGAGCGCGGCCAC | |
| | | CGAGAATCGGACGGGGGTAGTCTCAAGCTGGCCGGCC | |
| | | TGCTCTGGTGCCTGGCCTCGCGCCGCCGTGTATCGCCC | |
| | | CGCCCTGGGCGGCAAGGCTGGCCCGGTCGGCACCAGT | |
| | | TGCGTGAGCGGAAAGATGGCCGCTTCCCGGCCCTGCTG | |
| | | CAGGGAGCTCAAAATGGAGGACGCGGCGCTCGGGAGA | |
| | | GCGGGCGGGTGAGTCACCCACACAAAGGAAAAGGGCC | |
| | | TTTCCGTCCTCAGCCGTCGCTTCATGTGACTCCACGGA | |
| | | GTACCGGGCGCCGTCCAGGCACCTCGATTAGTTCTCGA | |
| | | GCTTTTGGAGTACGTCGTCTTTAGGTTGGGGGGAGGGG | |
| | | TTTTATGCGATGGAGTTTCCCCACACTGAGTGGGTGGA | |
| | | GACTGAAGTTAGGCCAGCTTGGCACTTGATGTAATTCT | |
| | | CCTTGGAATTTGCCCTTTTTGAGTTTGGATCTTGGTTCA | |
| | | TTCTCAAGCCTCAGACAGTGGTTCAAAGTTTTTTTCTTC | |
| | | CATTTCAGGTGTCGTGA | |
| 401 | Leader (aa) | MALPVTALLLPLALLLHAARP | 13 |
| 402 | Leader (na) | ATGGCCCTGCCTGTGACAGCCCTGCTGCTGCCTCTGGC | 54 |
| | | TCTGCTGCTGCATGCCGCTAGACCC | |
| 403 | CD 8 hinge | TTTPAPRPPTPAPTIASQPLSLRPEACRPAAGGAVHTRGLD | 14 |
| | (aa) | FACD | |
| 404 | CD8 hinge | ACCACGACGCCAGCGCCGCGACCACCAACACCGGCGC | 55 |
| | (na) | CCACCATCGCGTCGCAGCCCCTGTCCCTGCGCCCAGAG | |
| | | GCGTGCCGGCCAGCGGCGGGGGGCGCAGTGCACACGA | |
| | | GGGGGCTGGACTTCGCCTGTGAT | |
| 405 | Ig4 hinge (aa) | ESKYGPPCPPCPAPEFLGGPSVFLFPPKPKDTLMISRTPEV | 102 |
| | | TCVVVDVSQEDPEVQFNWYVDGVEVHNAKTKPREEQFN | |
| | | STYRVVSVLTVLHQDWLNGKEYKCKVSNKGLPSSIEKTI | |
| | | SKAKGQPREPQVYTLPPSQEEMTKNQVSLTCLVKGFYPS | |
| | | DIAVEWESNGQPENNYKTTPPVLDSDGSFFLYSRLTVDKS | |
| | | RWQEGNVFSCSVMHEALHNHYTQKSLSLSLGKM | |
| 406 | Ig4 hinge | GAGAGCAAGTACGGCCCTCCCTGCCCCCCTTGCCCTGC | 103 |
| | (na) | CCCCGAGTTCCTGGGCGGACCCAGCGTGTTCCTGTTCC | |
| | | CCCCCAAGCCCAAGGACACCCTGATGATCAGCCGGAC | |
| | | CCCCGAGGTGACCTGTGTGGTGGTGGACGTGTCCCAGG | |
| | | AGGACCCCGAGGTCCAGTTCAACTGGTACGTGGACGG | |
| | | CGTGGAGGTGCACAACGCCAAGACCAAGCCCCGGGAG | |
| | | GAGCAGTTCAATAGCACCTACCGGGTGGTGTCCGTGCT | |
| | | GACCGTGCTGCACCAGGACTGGCTGAACGGCAAGGAA | |
| | | TACAAGTGTAAGGTGTCCAACAAGGGCCTGCCCAGCA | |
| | | GCATCGAGAAAACCATCAGCAAGGCCAAGGGCCAGCC | |
| | | TCGGGAGCCCCAGGTGTACACCCTGCCCCCTAGCCAAG | |
| | | AGGAGATGACCAAGAACCAGGTGTCCCTGACCTGCCT | |
| | | GGTGAAGGGCTTCTACCCCAGCGACATCGCCGTGGAG | |
| | | TGGGAGAGCAACGGCCAGCCCGAGAACAACTACAAGA | |
| | | CCACCCCCCCTGTGCTGGACAGCGACGGCAGCTTCTTC | |
| | | CTGTACAGCCGGCTGACCGTGGACAAGAGCCGGTGGC | |
| | | AGGAGGGCAACGTCTTTAGCTGCTCCGTGATGCACGA | |
| | | GGCCCTGCACAACCACTACACCCAGAAGAGCCTGAGC | |
| | | CTGTCCCTGGGCAAGATG | |
| 407 | IgD hinge | RWPESPKAQASSVPTAQPQAEGSLAKATTAPATTRNTGR | 47 |
| | (aa) | GGEEKKKEKEKEEQEERETKTPECPSHTQPLGVYLLTPA | |
| | | VQDLWLRDKATFTCFVVGSDLKDAHLTWEVAGKVPTG | |
| | | GVEEGLLERHSNGSQSQHSRLTLPRSLWNAGTSVTCTLN | |
| | | HPSLPPQRLMALREPAAQAPVKLSLNLLASSDPPEAASW | |
| | | LLCEVSGFSPPNILLMWLEDQREVNTSGFAPARPPPQPGS | |
| | | TTFWAWSVLRVPAPPSPQPATYTCVVSHEDSRTLLNASR | |
| | | SLEVSYVTDH | |
| 408 | IgD hinge | AGGTGGCCCGAAAGTCCCAAGGCCCAGGCATCTAGTG | 48 |
| | (na) | TTCCTACTGCACAGCCCCAGGCAGAAGGCAGCCTAGC | |
| | | CAAAGCTACTACTGCACCTGCCACTACGCGCAATACTG | |
| | | GCCGTGGCGGGGAGGAGAAGAAAAAGGAGAAAGAGA | |
| | | AAGAAGAACAGGAAGAGAGGGAGACCAAGACCCCTG | |
| | | AATGTCCATCCCATACCCAGCCGCTGGGCGTCTATCTC | |
| | | TTGACTCCCGCAGTACAGGACTTGTGGCTTAGAGATAA | |
| | | GGCCACCTTTACATGTTTCGTCGTGGGCTCTGACCTGA | |
| | | AGGATGCCCATTTGACTTGGGAGGTTGCCGGAAAGGT | |
| | | ACCCACAGGGGGGGTTGAGGAAGGGTTGCTGGAGCGC | |
| | | CATTCCAATGGCTCTCAGAGCCAGCACTCAAGACTCAC | |
| | | CCTTCCGAGATCCCTGTGGAACGCCGGGACCTCTGTCA | |
| | | CATGTACTCTAAATCATCCTAGCCTGCCCCCACAGCGT | |
| | | CTGATGGCCCTTAGAGAGCCAGCCGCCCAGGCACCAG | |
| | | TTAAGCTTAGCCTGAATCTGCTCGCCAGTAGTGATCCC | |
| | | CCAGAGGCCGCCAGCTGGCTCTTATGCGAAGTGTCCGG | |
| | | CTTTAGCCCGCCCAACATCTTGCTCATGTGGCTGGAGG | |
| | | ACCAGCGAGAAGTGAACACCAGCGGCTTCGCTCCAGC | |
| | | CCGGCCCCCACCCCAGCCGGGTTCTACCACATTCTGGG | |
| | | CCTGGAGTGTCTTAAGGGTCCCAGCACCACCTAGCCCC | |
| | | CAGCCAGCCACATACACCTGTGTTGTGTCCCATGAAGA | |
| | | TAGCAGGACCCTGCTAAATGCTTCTAGGAGTCTGGAGG | |
| | | TTTCCTACGTGACTGACCATT | |
| 10 | GS | GGGGSGGGGS | 49 |
| | hinge/linker | | |
| | (aa) | | |
| 11 | GS | GGTGGCGGAGGTTCTGGAGGTGGAGGTTCC | 50 |
| | hinge/linker | | |
| | (na) | | |
| 12 | CD8TM (aa) | IYIWAPLAGTCGVLLLSLVITLYC | 15 |
| 13 | CD8 TM (na) | ATCTACATCTGGGCGCCCTTGGCCGGGACTTGTGGGGT | 56 |
| | | CCTTCTCCTGTCACTGGTTATCACCCTTTACTGC | |
| 14 | 4-1BB | KRGRKKLLYIFKQPFMRPVQTTQEEDGCSCRFPEEEEGGC | 16 |
| | intracellular | EL | |
| | domain (aa) | | |
| 15 | 4-1BB | AAACGGGGCAGAAAGAAACTCCTGTATATATTCAAAC | 60 |
| | intracellular | AACCATTTATGAGACCAGTACAAACTACTCAAGAGGA | |
| | domain (na) | AGATGGCTGTAGCTGCCGATTTCCAGAAGAAGAAGAA | |
| | | GGAGGATGTGAACTG | |
| 16 | CD27 (aa) | QRRKYRSNKGESPVEPAEPCRYSCPREEEGSTIPIQEDYRK | 51 |
| | | PEPACSP | |
| 17 | CD27 (na) | AGGAGTAAGAGGAGCAGGCTCCTGCACAGTGACTACA | 52 |
| | | TGAACATGACTCCCCGCCGCCCCGGGCCCACCCGCAA | |
| | | GCATTACCAGCCCTATGCCCCACCACGCGACTTCGCAG | |
| | | CCTATCGCTCC | |
| 18 | CD3-zeta | RVKFSRSADAPAYKQGQNQLYNELNLGRREEYDVLDKR | 17 |
| | (aa) | RGRDPEMGGKPRRKNPQEGLYNELQKDKMAEAYSEIGM | |
| | | KGERRRGKGHDGLYQGLSTATKDTYDALHMQALPPR | |
| 19 | CD3-zeta | AGAGTGAAGTTCAGCAGGAGCGCAGACGCCCCCGCGT | 101 |
| | (na) | ACAAGCAGGGCCAGAACCAGCTCTATAACGAGCTCAA | |
| | | TCTAGGACGAAGAGAGGAGTACGATGTTTTGGACAAG | |
| | | AGACGTGGCCGGGACCCTGAGATGGGGGGAAAGCCGA | |
| | | GAAGGAAGAACCCTCAGGAAGGCCTGTACAATGAACT | |
| | | GCAGAAAGATAAGATGGCGGAGGCCTACAGTGAGATT | |
| | | GGGATGAAAGGCGAGCGCCGGAGGGGCAAGGGGCAC | |
| | | GATGGCCTTTACCAGGGTCTCAGTACAGCCACCAAGG | |
| | | ACACCTACGACGCCCTTCACATGCAGGCCCTGCCCCCT | |
| | | CGC | |
| 20 | CD3-zeta | RVKFSRSADAPAYQQGQNQLYNELNLGRREEYDVLDKR | 43 |
| | (aa) | RGRDPEMGGKPRRKNPQEGLYNELQKDKMAEAYSEIGM | |
| | | KGERRRGKGHDGLYQGLSTATKDTYDALHMQALPPR | |
| 21 | CD3-zeta | AGAGTGAAGTTCAGCAGGAGCGCAGACGCCCCCGCGT | 44 |
| | (na) | ACCAGCAGGGCCAG | |
| | | AACCAGCTCTATAACGAGCTCAATCTAGGACGAAGAG | |
| | | AGGAGTACGATGTTT | |
| | | TGGACAAGAGACGTGGCCGGGACCCTGAGATGGGGGG | |
| | | AAAGCCGAGAAGGA | |
| | | AGAACCCTCAGGAAGGCCTGTACAATGAACTGCAGAA | |
| | | AGATAAGATGGCGG | |
| | | AGGCCTACAGTGAGATTGGGATGAAAGGCGAGCGCCG | |
| | | GAGGGGCAAGGGGC | |
| | | ACGATGGCCTTTACCAGGGTCTCAGTACAGCCACCAAG | |
| | | GACACCTACGACGC | |
| | | CCTTCACATGCAGGCCCTGCCCCCTCGC | |
| 22 | linker | GGGGS | 18 |
| 23 | linker | GGTGGCGGAGGTTCTGGAGGTGGAGGTTCC | 50 |
| 24 | PD-1 | Pgwfldspdrpwnpptfspallvvtegdnatftcsfsntsesfvlnwyrmspsnqtdkl | |
| | extracellular | aafpedrsqpgqdcrfrvtqlpngrdfhmsvvrarrndsgtylcgaislapkaqikeslra | |
| | domain (aa) | elrvterraevptahpspsprpagqfqtlv | |
| 25 | PD-1 | Cccggatggtttctggactctccggatcgcccgtggaatcccccaaccttctcaccggcac | |
| | extracellular | tcttggttgtgactgagggcgataatgcgaccttcacgtgctcgttctccaacacctccgaat | |
| | domain (na) | cattcgtgctgaactggtaccgcatgagcccgtcaaaccagaccgacaagctcgccgcgt | |
| | | ttccggaagatcggtcgcaaccgggacaggattgtcggttccgcgtgactcaactgccga | |
| | | atggcagagacttccacatgagcgtggtccgcgctaggcgaaacgactccgggacctac | |
| | | ctgtgcggagccatctcgctggcgcctaaggcccaaatcaaagagagcttgagggccga | |
| | | actgagagtgaccgagcgcagagctgaggtgccaactgcacatccatccccatcgcctc | |
| | | ggcctgcggggcagtttcagaccctggtc | |
| 26 | PD-1 CAR | Malpvtalllplalllhaarppgwfldspdrpwnpptfspallvvtegdnatftcsfsntse | |
| | (aa) with | sfvlnwyrmspsnqtdklaafpedrsqpgqdcrfrvtqlpngrdfhmsvvrarrndsgt | |
| | signal | ylcgaislapkaqikeslraelrvterraevptahpspsprpagqfqtlvtttpaprpptpap | |
| | | tiasqplslrpeacrpaaggavhtrgldfacdiyiwaplagtcgvlllslvitlyckrgrkkll | |
| | | yifkqpfmrpvqttqeedgcscrfpeeeeggceltvkfsrsadapaykqgqnqlyneln | |
| | | lgrreeydvldkttgrdpemggkprrknpqeglynelqkdkmaeayseigmkgerrr | |
| | | gkghdglyqglstatkdtydalhmqalppr | |
| 27 | PD-1 CAR | Atggccctccctgtcactgccctgcttctccccctcgcactcctgctccacgccgctagac | |
| | (na) | cacccggatggtttctggactctccggatcgcccgtggaatcccccaaccttctcaccggc | |
| | | actcttggttgtgactgagggcgataatgcgaccttcacgtgctcgttctccaacacctccga | |
| | | atcattcgtgctgaactggtaccgcatgagcccgtcaaaccagaccgacaagctcgccgc | |
| | | gtttccggaagatcggtcgcaaccgggacaggattgtcggttccgcgtgactcaactgcc | |
| | | gaatggcagagacttccacatgagcgtggtccgcgctaggcgaaacgactccgggacct | |
| | | acctgtgcggagccatctcgctggcgcctaaggcccaaatcaaagagagcttgagggcc | |
| | | gaactgagagtgaccgagcgcagagctgaggtgccaactgcacatccatccccatcgcc | |
| | | tcggcctgcggggcagtttcagaccctggtcacgaccactccggcgccgcgcccaccga | |
| | | ctccggccccaactatcgcgagccagcccctgtcgctgaggccggaagcatgccgccct | |
| | | gccgccggaggtgctgtgcatacccggggattggacttcgcatgcgacatctacatttggg | |
| | | ctcctctcgccggaacttgtggcgtgctccttctgtccctggtcatcaccctgtactgcaagc | |
| | | ggggtcggaaaaagcttctgtacattttcaagcagcccttcatgaggcccgtgcaaaccac | |
| | | ccaggaggaggacggttgctcctgccggttccccgaagaggaagaaggaggttgcgag | |
| | | ctgcgcgtgaagttctcccggagcgccgacgcccccgcctataagcagggccagaacca | |
| | | gctgtacaacgaactgaacctgggacggcgggaagagtacgatgtgctggacaagcgg | |
| | | cgcggccgggaccccgaaatgggcgggaagcctagaagaaagaaccctcaggaaggc | |
| | | ctgtataacgagctgcagaaggacaagatggccgaggcctactccgaaattgggatgaa | |
| | | gggagagcggcggaggggaaaggggcacgacggcctgtaccaaggactgtccaccg | |
| | | ccaccaaggacacatacgatgccctgcacatgcaggcccttccccctcgc | |
| 28 | linker | (Gly-Gly-Gly-Ser)ₙ, where n = 1-10 | 105 |
| 29 | linker | (Gly4 Ser)4 | 106 |
| 30 | linker | (Gly4 Ser)3 | 107 |
| 31 | linker | (Gly3Ser) | 108 |
| 32 | polyA | (aaaaaaaaaa)ₙ, where n = 200 | 118 |
| 33 | polyA | (aaaaaaaaaa)ₙ, where n = 15 | 104 |
| 34 | polyA | (aaaaaaaaaa)ₙ, where n = 500 | 109 |
| 35 | polyA | (tttttttttt)ₙ, where n = 10 | 110 |
| 36 | polyA | (tttttttttt)ₙ, where n = 500 | 111 |
| 37 | polyA | (aaaaaaaaaa)ₙ, where n = 500 | 112 |
| 38 | polyA | (aaaaaaaaaa)ₙ, where n = 40 | 113 |
| 39 | PD1 CAR | Pgwfldspdrpwnpptfspallvvtegdnatftcsfsntsesfvlnwyrmspsnqtdkl | |
| | (aa) | aafpedrsqpgqdcrfrvtqlpngrdfhmsvvrarrndsgtylcgaislapkaqikeslra | |
| | | elrvterraevptahpspsprpagqfqtlvtttpaprpptpaptiasqplslrpeacrpaag | |
| | | gavhtrgldfacdiyiwaplagtcgvlllslvitlyckrgrkkllyitkqpfmrpvqttqee | |
| | | dgcscrfpeeeeggcelrvkfsrsadapaykqgqnqlynelnlgrreeydvldkrrgrd | |
| | | pemggkprrknpqeglynelqkdkmaeayseigmkgerrrgkghdglyqglstatk | |
| | | dtydalhmqalppr | |

### Cancer Associated Antigens

[0308] In certain aspects, the present invention provides immune effector cells (e.g., T cells, NK cells) that are engineered to contain one or more CARs that direct the immune effector cells to cancer. This is achieved through an antigen binding domain on the CAR that is specific for a cancer associated antigen. There are two classes of cancer associated antigens (tumor antigens) that can be targeted by the CARs of the instant invention: (1) cancer associated antigens that are expressed on the surface of cancer cells; and (2) cancer associated antigens that itself is intracellar, however, a fragment of such antigen (peptide) is presented on the surface of the cancer cells by MHC (major histocompatibility complex).

[0309] Accordingly, the present invention provides CARs that target the following cancer associated antigens (tumor antigens): CD19, CD123, CD22, CD30, CD171, CS-1, CLL-1 (CLECL1), CD33, EGFRVIII, GD2, GD3, BCMA, Tn Ag, PSMA, ROR1, FLT3, FAP, TAG72, CD38, CD44v6, CEA, EPCAM, B7H3, KIT, IL-13Ra2, Mesothelin, IL-11Ra, PSCA, VEGFR2, LewisY, CD24, PDGFR-beta, PRSS21, SSEA-4, CD20, Folate receptor alpha, ERBB2 (Her2/neu), MUC1, EGFR, NCAM, Prostase, PAP, ELF2M, Ephrin B2, IGF-I receptor, CAIX, LMP2, gp100, bcr-abl, tyrosinase, EphA2, Fucosyl GM1, sLe, GM3, TGS5, HMWMAA, o-acetyl-GD2, Folate receptor beta, TEM1/CD248, TEM7R, CLDN6, TSHR, GPRC5D, CXORF61, CD97, CD179a, ALK, Polysialic acid, PLAC1, GloboH, NY-BR-1, UPK2, HAVCR1, ADRB3, PANX3, GPR20, LY6K, OR51E2, TARP, WT1, NY-ESO-1, LAGE-1a, legumain, HPV E6,E7, MAGE-A1, MAGE A1, ETV6-AML, sperm protein 17, XAGE1, Tie 2, MAD-CT-1, MAD-CT-2, Fos-related antigen 1, p53, p53 mutant, prostein, survivin and telomerase, PCTA-1/Galectin 8, MelanA/MART1, Ras mutant, hTERT, sarcoma translocation breakpoints, ML-IAP, ERG (TMPRSS2 ETS fusion gene), NA17, PAX3, Androgen receptor, Cyclin B1, MYCN, RhoC, TRP-2, CYP1B1, BORIS, SART3, PAX5, OY-TES1, LCK, AKAP-4, SSX2, RAGE-1, human telomerase reverse transcriptase, RU1, RU2, intestinal carboxyl esterase, mut hsp70-2, CD79a, CD79b, CD72, LAIR1, FCAR, LILRA2, CD300LF, CLEC12A, BST2, EMR2, LY75, GPC3, FCRL5, and IGLL1.

### Anti-Target Chimeric Antigen Receptor (CAR)

[0310] The present invention encompasses a recombinant DNA construct comprising sequences encoding an anti-target CAR, wherein the anti-target CAR comprises a ligand that binds to a target CAR, e.g., a target CAR described herein. In an embodiment, the ligand comprises a cognate antigen molecule or an antibody molecule that binds the target CAR. In an embodiment, the antibody molecule that binds the target CAR comprises an antibody molecule that binds an extracellular domain of the target CAR, e.g., an antigen binding domain or a hinge domain of the target CAR. In an embodiment, the antibody molecule that binds the target CAR comprises an anti-idiotypic antibody molecule, e.g., an anti-idiotypic antibody molecule that binds the target CAR, e.g., binds an extracellular domain of the target CAR (e.g., an antigen binding domain or a hinge domain of the target CAR). In an embodiment, the antigen binding domain comprises a variable light (VL) domain and a variable heavy (VH) domain, optionally connected with a linker, e.g., as described herein. In an embodiment, the order of the variable domain, e.g., in which the VL and VH domains appear in the antigen binding domain, e.g., scFv, can be varied (i.e., VL-VH, or VH-VL orientation). In an embodiment, the antigen binding domain comprises a VL domain followed by a VH domain (i.e., VL-VH). In an embodiment, the antigen binding domain comprises a VH domain followed by a VL domain (i.e., VL-VH).

[0311] In an embodiment, the sequence of the ligand is contiguous with and in the same reading frame as a nucleic acid sequence encoding an intracellular signaling domain. The intracellular signaling domain can comprise a costimulatory signaling domain and/or a primary signaling domain, e.g., a zeta chain. The costimulatory signaling domain can be a portion of the anti-target CAR comprising at least a portion of the intracellular domain of a costimulatory molecule.

[0312] In specific aspects, an anti-target CAR construct of the invention comprises a scFv domain, wherein the scFv may be preceded by an optional leader sequence such as provided in SEQ ID NO: 401, and followed by an optional hinge sequence such as provided in SEQ ID NO: 403 or SEQ ID NO:405 or SEQ ID NO:407 or SEQ ID NO:10, a transmembrane region such as provided in SEQ ID NO:12, an intracellular signalling domain that includes SEQ ID NO:14, and a CD3 zeta sequence that includes SEQ ID NO:18 or SEQ ID NO:20, e.g., wherein the domains are contiguous with and in the same reading frame to form a single fusion protein.

[0313] In one aspect, an exemplary anti-target CAR construct comprises an optional leader sequence (e.g., a leader sequence described herein), a ligand (e.g., a cognate antigen molecule or an antibody molecule that binds a target CAR), a hinge (e.g., a hinge region described herein), a transmembrane domain (e.g., a transmembrane domain described herein), and an intracellular stimulatory domain (e.g., an intracellular stimulatory domain described herein). In one aspect, an exemplary anti-target CAR construct comprises an optional leader sequence (e.g., a leader sequence described herein), a ligand (e.g., a cognate antigen molecule or an antibody molecule that binds a target CAR), a hinge (e.g., a hinge region described herein), a transmembrane domain (e.g., a transmembrane domain described herein), an intracellular costimulatory signaling domain (e.g., a costimulatory signaling domain described herein) and/or an intracellular primary signaling domain (e.g., a primary signaling domain described herein).

[0314] An exemplary leader sequence is provided as SEQ ID NO: 401. An exemplary hinge/spacer sequence is provided as SEQ ID NO: 403 or SEQ ID NO:405 or SEQ ID NO: 407 or SEQ ID NO:10. An exemplary transmembrane domain sequence is provided as SEQ ID NO:12. An exemplary sequence of the intracellular signaling domain of 4-1BB is provided as SEQ ID NO: 14. An exemplary CD3zeta domain sequence is provided as SEQ ID NO: 18 or SEQ ID NO:20.

[0315] In one aspect, the present invention encompasses a recombinant nucleic acid construct comprising a nucleic acid molecule encoding an anti-target CAR, wherein the nucleic acid molecule comprises the nucleic acid sequence encoding a ligand, e.g., as described herein, that is contiguous with and in the same reading frame as a nucleic acid sequence encoding an intracellular signaling domain.

[0316] In one aspect, the present invention encompasses a recombinant nucleic acid construct comprising a nucleic acid molecule encoding an anti-target CAR, wherein the nucleic acid molecule comprises a nucleic acid sequence encoding a ligand, wherein the sequence is contiguous with and in the same reading frame as the nucleic acid sequence encoding an intracellular signaling domain. An exemplary intracellular signaling domain that can be used in the anti-target CAR includes, but is not limited to, one or more intracellular signaling domains of, e.g., CD3-zeta, CD28, CD27, 4-1BB, and the like. In some instances, the anti-target CAR can comprise any combination of CD3-zeta, CD28, 4-1BB, and the like.

[0317] The nucleic acid sequences coding for the desired molecules can be obtained using recombinant methods known in the art, such as, for example by screening libraries from cells expressing the nucleic acid molecule, by deriving the nucleic acid molecule from a vector known to include the same, or by isolating directly from cells and tissues containing the same, using standard techniques. Alternatively, the nucleic acid of interest can be produced synthetically, rather than cloned.

[0318] The present invention includes retroviral and lentiviral vector constructs expressing an anti-target CAR that can be directly transduced into a cell.

[0319] The present invention also includes an RNA construct that can be directly transfected into a cell. A method for generating mRNA for use in transfection involves in vitro transcription (IVT) of a template with specially designed primers, followed by polyA addition, to produce a construct containing 3′ and 5′ untranslated sequence (“UTR”) (e.g., a 3′ and/or 5′ UTR described herein), a 5′ cap (e.g., a 5′ cap described herein) and/or Internal Ribosome Entry Site (IRES) (e.g., an IRES described herein), the nucleic acid to be expressed, and a polyA tail, typically 50-2000 bases in length (SEQ ID NO:32). RNA so produced can efficiently transfect different kinds of cells. In one embodiment, the template includes sequences for the CAR. In an embodiment, an RNA CAR vector is transduced into a cell, e.g., a T cell or a NK cell, by electroporation.

### Anti-Target CAR Ligand

[0320] In an embodiment, the anti-target CAR comprises a ligand that binds to a target CAR, e.g., a target CAR described herein. In an embodiment, the ligand comprises a cognate antigen molecule or an antibody molecule that binds the target CAR. In an embodiment, the antibody molecule that binds the target CAR comprises an antibody molecule that binds an extracellular domain of the target CAR, e.g., an antigen binding domain or a hinge domain of the target CAR. In an embodiment, the antibody molecule that binds the target CAR comprises an anti-idiotypic antibody molecule, e.g., an anti-idiotypic antibody molecule that binds the target CAR, e.g., binds an extracellular domain of the target CAR (e.g., an antigen binding domain or a hinge domain of the target CAR).

[0321] In an embodiment, the target CAR is chosen from: an CD19CAR, CD20CAR, CD22CAR, mesothelinCAR, CLL-1CAR, EGFRVIIICAR, or a CAR targeting any tumor antigen described herein. In an embodiment, the target CAR is a CD19 CAR.

[0322] In an embodiment, the target CAR is a target CAR described herein, and the anti-target CAR comprises a ligand that binds to the target CAR, e.g., binds an extracellular domain of the target CAR (e.g., an antigen binding domain or a hinge domain of the target CAR). In an embodiment, the ligand of the anti-target CAR binds to the target CAR antigen binding domain. In an embodiment, the ligand of the anti-target CAR binds to the hinge domain of the target CAR.

[0323] In an embodiment, the anti-target CAR ligand comprises an antibody molecule, e.g., an anti-idiotypic antibody molecule, e.g., an antibody molecule that binds to the antigen binding domain on the surface of the target CAR.

[0324] In an embodiment, the anti-target CAR ligand comprises a cognate antigen, e.g., a target antigen, which binds to, e.g., the target antigen binding domain on the surface of the target CAR. In some embodiments, the ligand that comprises the cognate antigen comprises the full length protein that comprises the cognate antigen. In other embodiments, the ligand that comprises the cognate antigen comprises an fragment or mutant of the protein that comprises the cognate antigen, wherein the fragment or mutant binds a target CAR.

[0325] In an embodiment, the anti-target CAR ligand comprises an antibody molecule that binds to the target antigen binding domain and/or the hinge region of the target-CAR.

### Anti-CD19 CAR

[0326] In an embodiment, the target CAR is a CD19CAR and the anti-target CAR comprises a ligand that binds to a CD19CAR, e.g., binds an extracellular domain of the CD19CAR (e.g., an antigen binding domain (e.g., a CD19 antigen binding domain) or a hinge domain of the CD19CAR). In an embodiment, the ligand of the anti-target CAR binds to the CD19 antigen binding domain of the CD19CAR. In an embodiment, the ligand of the anti-target CAR binds to the hinge domain of the CD19CAR.

[0327] In an embodiment, the anti-target CAR ligand comprises a cognate antigen, e.g., a CD19 antigen, which binds to, e.g., the CD19 antigen binding domain on the surface of the CD19CAR.

[0328] In an embodiment, the anti-target CAR ligand comprises an antibody molecule that binds to the CD19 antigen binding domain and/or the hinge region of the CD19CAR.

[0329] In an embodiment, the anti-target CAR ligand comprises an antibody molecule, e.g., an anti-idiotypic antibody molecule, e.g., an antibody molecule that binds to the CD19 antigen binding domain on the surface of the CD19CAR. In an embodiment, the anti-idiotypic antibody molecule comprises the anti-idiotypic antibody that binds anti-CD19 of clone no. 136.20.1, as disclosed in International Application WO 2014/190273, filed on May 23, 2014, the entire contents of which are hereby incorporated by reference.

[0330] Exemplary anti-CAR antibodies that can be used in the methods disclosed herein are described, e.g., in WO 2014/190273 and by Jena et al., “Chimeric Antigen Receptor (CAR)-Specific Monoclonal Antibody to Detect CD19-Specific T cells in Clinical Trials”, PLOS March 2013 8:3 e57838, the contents of which are incorporated by reference.

[0331] In one embodiment, the anti-idiotypic antibody molecule recognizes an anti-CD19 antibody molecule, e.g., an anti-CD19 scFv. For instance, the anti-idiotypic antibody molecule can compete for binding with the CD19-specific CAR mAb clone no. 136.20.1 described in Jena et al., PLOS March 2013 8:3 e57838; may have the same CDRs (e.g., one or more of, e.g., all of, VH CDR1, VH CDR2, CH CDR3, VL CDR1, VL CDR2, and VL CDR3, using the Kabat definition, the Chothia definition, or a combination of the Kabat and Chothia definitions) as the CD19-specific CAR mAb clone no. 136.20.1; may have one or more (e.g., 2) variable regions as the CD19-specific CAR mAb clone no. 136.20.1, or may comprise the CD19-specific CAR mAb clone no. 136.20.1. In some embodiments, the anti-idiotypic antibody was made according to a method described in Jena et al. In another embodiment, the anti-idiotypic antibody molecule is an anti-idiotypic antibody molecule described in WO 2014/190273. In some embodiments, the anti-idiotypic antibody molecule has the same CDRs (e.g., one or more of, e.g., all of, VH CDR1, VH CDR2, CH CDR3, VL CDR1, VL CDR2, and VL CDR3) as an antibody molecule of WO 2014/190273 such as 136.20.1; may have one or more (e.g., 2) variable regions of an antibody molecule of WO 2014/190273, or may comprise an antibody molecule of WO 2014/190273 such as 136.20.1. In other embodiments, the anti-target CAR antibody binds to a constant region of the extracellular binding domain of the target CAR molecule, e.g., as described in WO 2014/190273. In some embodiments, the anti-target CAR antibody binds to a constant region of the extracellular binding domain of the target CAR molecule, e.g., a heavy chain constant region (e.g., a CH2-CH3 hinge region) or light chain constant region. For instance, in some embodiments the anti-target CAR antibody competes for binding with the 2D3 monoclonal antibody described in WO 2014/190273, has the same CDRs (e.g., one or more of, e.g., all of, VH CDR1, VH CDR2, CH CDR3, VL CDR1, VL CDR2, and VL CDR3) as 2D3, or has one or more (e.g., 2) variable regions of 2D3, or comprises 2D3 as described in WO 2014/190273.

[0332] Clone 136.20.1, as disclosed in WO 2014/190273:

HCDR1:
(SEQ ID NO: 2005)
GFDFSRYW
HCDR2:
(SEQ ID NO: 2006)
INLDSSTI
HCDR3:
(SEQ ID NO: 2007)
ARRYDAMDY
LCDR1:
((SEQ ID NO: 2008)
ESVDDYGISF
LCDR2:
(SEQ ID NO: 2009)
AAP
LCDR3:
(SEQ ID NO: 2010)
QQSKD
VH:
(SEQ ID NO: 2011)
LKPREVKLVESGGGLVQPGGSLKLSCAASGFDFSRYWMSWVRQAPGKGLE
WIGEINLDSSTINYTPSLKDKFIISRDNAKNTLYLQMSKVRSEDTALYYC
ARRYDAMDYWGQGTSVTVSSAKTTAPSVYPLAPVCGDTTGSSVTLGCLVK
ASQ
VL:
(SEQ ID NO: 2012)
ASDIVLTQSPASLAVSLGQRATISCRASESVDDYGISFMNWFQQKPGQPP
KLLIYAAPNQGSGVPARFSGSGSGTDFSLNIHPMEEDDTAMYFCQQSKDV
RWRHQAGDQTG

### Other Anti-Target CARs

[0333] In an embodiment, the target CAR is a CD33CAR and the anti-target CAR comprises a ligand that binds to a CD33CAR, e.g., binds an extracellular domain of the CD33CAR (e.g., an antigen binding domain (e.g., a CD33 antigen binding domain) or a hinge domain of the CD33CAR). In an embodiment, the ligand of the anti-target CAR binds to the CD33 antigen binding domain of the CD33CAR. In an embodiment, the ligand of the anti-target CAR binds to the hinge domain of the CD33CAR. In an embodiment, the anti-target CAR ligand comprises a cognate antigen, e.g., a CD33 antigen, which binds to, e.g., the CD33 antigen binding domain on the surface of the CD33CAR. In an embodiment, the anti-target CAR ligand comprises an antibody molecule that binds to the CD33 antigen binding domain and/or the hinge region of the CD33CAR. In an embodiment, the anti-target CAR ligand comprises an antibody molecule, e.g., an anti-idiotypic antibody molecule, e.g., an antibody molecule that binds to the CD33 antigen binding domain on the surface of the CD33CAR.

[0334] In an embodiment, the target CAR is a EGFRVIIICAR and the anti-target CAR comprises a ligand that binds to a EGFRvIIICAR, e.g., binds an extracellular domain of the EGFRvIIICAR (e.g., an antigen binding domain (e.g., a EGFRVIII antigen binding domain) or a hinge domain of the EGFRvIIICAR). In an embodiment, the ligand of the anti-target CAR binds to the EGFRVIII antigen binding domain of the EGFRvIIICAR. In an embodiment, the ligand of the anti-target CAR binds to the hinge domain of the EGFRvIII CAR. In an embodiment, the anti-target CAR ligand comprises a cognate antigen, e.g., a EGFRvIII antigen, which binds to, e.g., the EGFRVIII antigen binding domain on the surface of the EGFRvIIICAR. In an embodiment, the anti-target CAR ligand comprises an antibody molecule that binds to the EGFRVIII antigen binding domain and/or the hinge region of the EGFRvIIICAR. In an embodiment, the anti-target CAR ligand comprises an antibody molecule, e.g., an anti-idiotypic antibody molecule, e.g., an antibody molecule that binds to the EGFRVIII antigen binding domain on the surface of the EGFRVIIICAR.

[0335] In an embodiment, the target CAR is a mesothelinCAR and the anti-target CAR comprises a ligand that binds to a mesothelinCAR, e.g., binds an extracellular domain of the mesothelinCAR (e.g., an antigen binding domain (e.g., a mesothelin antigen binding domain) or a hinge domain of the mesothelinCAR). In an embodiment, the ligand of the anti-target CAR binds to the mesothelin antigen binding domain of the mesothelinCAR. In an embodiment, the ligand of the anti-target CAR binds to the hinge domain of the mesothelinCAR. In an embodiment, the anti-target CAR ligand comprises a cognate antigen, e.g., a mesothelin antigen, which binds to, e.g., the mesothelin antigen binding domain on the surface of the mesothelinCAR. In an embodiment, the anti-target CAR ligand comprises an antibody molecule that binds to the mesothelin antigen binding domain and/or the hinge region of the mesothelinCAR. In an embodiment, the anti-target CAR ligand comprises an antibody molecule, e.g., an anti-idiotypic antibody molecule, e.g., an antibody molecule that binds to the mesothelin antigen binding domain on the surface of the mesothelinCAR.

[0336] In an embodiment, the target CAR is a BCMACAR and the anti-target CAR comprises a ligand that binds to a BCMACAR, e.g., binds an extracellular domain of the BCMACAR (e.g., an antigen binding domain (e.g., a BCMA antigen binding domain) or a hinge domain of the BCMACAR). In an embodiment, the ligand of the anti-target CAR binds to the BCMA antigen binding domain of the BCMACAR. In an embodiment, the ligand of the anti-target CAR binds to the hinge domain of the BCMACAR. In an embodiment, the anti-target CAR ligand comprises a cognate antigen, e.g., a BCMA antigen, which binds to, e.g., the BCMA antigen binding domain on the surface of the BCMACAR. In an embodiment, the anti-target CAR ligand comprises an antibody molecule that binds to the BCMA antigen binding domain and/or the hinge region of the BCMACAR. In an embodiment, the anti-target CAR ligand comprises an antibody molecule, e.g., an anti-idiotypic antibody molecule, e.g., an antibody molecule that binds to the BCMA antigen binding domain on the surface of the BCMACAR.

[0337] In an embodiment, the target CAR is a CD20CAR and the anti-target CAR comprises a ligand that binds to a CD20CAR, e.g., binds an extracellular domain of the CD20CAR (e.g., an antigen binding domain (e.g., a CD20 antigen binding domain) or a hinge domain of the CD20 CAR). In an embodiment, the ligand of the anti-target CAR binds to the CD20 antigen binding domain of the CD20CAR. In an embodiment, the ligand of the anti-target CAR binds to the hinge domain of the CD20CAR. In an embodiment, the anti-target CAR ligand comprises a cognate antigen, e.g., a CD20 antigen, which binds to, e.g., the CD20 antigen binding domain on the surface of the CD20CAR. In an embodiment, the anti-target CAR ligand comprises an antibody molecule that binds to the CD20 antigen binding domain and/or the hinge region of the CD20CAR. In an embodiment, the anti-target CAR ligand comprises an antibody molecule, e.g., an anti-idiotypic antibody molecule, e.g., an antibody molecule that binds to the CD20 antigen binding domain on the surface of the CD20CAR.

[0338] In an embodiment, the target CAR is a CD22CAR and the anti-target CAR comprises a ligand that binds to a CD22CAR, e.g., binds an extracellular domain of the CD22CAR (e.g., an antigen binding domain (e.g., a CD22 antigen binding domain) or a hinge domain of the CD22CAR). In an embodiment, the ligand of the anti-target CAR binds to the CD22 antigen binding domain of the CD22CAR. In an embodiment, the ligand of the anti-target CAR binds to the hinge domain of the CD22CAR. In an embodiment, the anti-target CAR ligand comprises a cognate antigen, e.g., a CD22 antigen, which binds to, e.g., the CD22 antigen binding domain on the surface of the CD22CAR. In an embodiment, the anti-target CAR ligand comprises an antibody molecule that binds to the CD22 antigen binding domain and/or the hinge region of the CD22CAR. In an embodiment, the anti-target CAR ligand comprises an antibody molecule, e.g., an anti-idiotypic antibody molecule, e.g., an antibody molecule that binds to the CD22 antigen binding domain on the surface of the CD22CAR.

[0339] In an embodiment, the target CAR is a CD123CAR and the anti-target CAR comprises a ligand that binds to a CD123CAR, e.g., binds an extracellular domain of the CD123CAR (e.g., an antigen binding domain (e.g., a CD22 antigen binding domain) or a hinge domain of the CD123CAR). In an embodiment, the ligand of the anti-target CAR binds to the CD123 antigen binding domain of the CD123CAR. In an embodiment, the ligand of the anti-target CAR binds to the hinge domain of the CD123CAR. In an embodiment, the anti-target CAR ligand comprises a cognate antigen, e.g., a CD123 antigen, which binds to, e.g., the CD123 antigen binding domain on the surface of the CD123CAR. In an embodiment, the anti-target CAR ligand comprises an antibody molecule that binds to the CD123 antigen binding domain and/or the hinge region of the CD123CAR. In an embodiment, the anti-target CAR ligand comprises an antibody molecule, e.g., an anti-idiotypic antibody molecule, e.g., an antibody molecule that binds to the CD123 antigen binding domain on the surface of the CD123CAR.

### Transmembrane Domain

[0340] With respect to the transmembrane domain, in various embodiments, an anti-target CAR can be designed to comprise a transmembrane domain that is attached to the extracellular domain, e.g., ligand, of the anti-target CAR. A transmembrane domain can include one or more additional amino acids adjacent to the transmembrane region, e.g., one or more amino acid associated with the extracellular region of the protein from which the transmembrane was derived (e.g., 1, 2, 3, 4, 5, 6, 7, 8, 9, 10 up to 15 amino acids of the extracellular region) and/or one or more additional amino acids associated with the intracellular region of the protein from which the transmembrane protein is derived (e.g., 1, 2, 3, 4, 5, 6, 7, 8, 9, 10 up to 15 amino acids of the intracellular region). In one aspect, the transmembrane domain is one that is associated with one of the other domains of the anti-target CAR, e.g., in one embodiment, the transmembrane domain may be from the same protein that the signaling domain, costimulatory domain or the hinge domain is derived from. In another aspect, the transmembrane domain is not derived from the same protein that any other domain of the anti-target CAR is derived from. In some instances, the transmembrane domain can be selected or modified by amino acid substitution to avoid binding of such domains to the transmembrane domains of the same or different surface membrane proteins, e.g., to minimize interactions with other members of the receptor complex.

[0341] The transmembrane domain may be derived either from a natural or from a recombinant source. Where the source is natural, the domain may be derived from any membrane-bound or transmembrane protein. In one aspect the transmembrane domain is capable of signaling to the intracellular domain(s) whenever the anti-target CAR has bound to a target. A transmembrane domain of particular use in this invention may include at least the transmembrane region(s) of e.g., the alpha, beta or zeta chain of the T-cell receptor, CD28, CD27, CD3 epsilon, CD45, CD4, CD5, CD8, CD9, CD16, CD22, CD33, CD37, CD64, CD80, CD86, CD134, CD137, CD154. In some embodiments, a transmembrane domain may include at least the transmembrane region(s) of, e.g., KIRDS2, OX40, CD2, CD27, LFA-1 (CD11a, CD18), ICOS (CD278), 4-1BB (CD137), GITR, CD40, BAFFR, HVEM (LIGHTR), SLAMF7, NKp80 (KLRF1), NKp44, NKp30, NKp46, CD160, CD19, IL2R beta, IL2R gamma, IL7R a, ITGA1, VLA1, CD49a, ITGA4, IA4, CD49D, ITGA6, VLA-6, CD49f, ITGAD, CD11d, ITGAE, CD103, ITGAL, CD11a, LFA-1, ITGAM, CD11b, ITGAX, CD11c, ITGB1, CD29, ITGB2, CD18, LFA-1, ITGB7, TNFR2, DNAM1 (CD226), SLAMF4 (CD244, 2B4), CD84, CD96 (Tactile), CEACAM1, CRTAM, Ly9 (CD229), CD160 (BY55), PSGL1, CD100 (SEMA4D), SLAMF6 (NTB-A, Ly108), SLAM (SLAMF1, CD150, IPO-3), BLAME (SLAMF8), SELPLG (CD162), LTBR, PAG/Cbp, NKG2D, NKG2C.

[0342] In some instances, the transmembrane domain can be attached to the extracellular region of the anti-target CAR, e.g., the ligand of the anti-target CAR, via a hinge, e.g., a hinge from a human protein. For example, in one embodiment, the hinge can be a human Ig (immunoglobulin) hinge (e.g., an IgG4 hinge, an IgD hinge), a GS linker (e.g., a GS linker described herein), a KIR2DS2 hinge or a CD8a hinge. In one embodiment, the hinge or spacer comprises (e.g., consists of) the amino acid sequence of SEQ ID NO:403. In one aspect, the transmembrane domain comprises (e.g., consists of) a transmembrane domain of SEQ ID NO: 12.

[0343] In one aspect, the hinge or spacer comprises an IgG4 hinge. For example, in one embodiment, the hinge or spacer comprises a hinge of the amino acid sequence ESKYGPPCPPCPAPEFLGGPSVFLFPPKPKDTLMISRTPEVTCVVVDVSQEDPEVQFN WYVDGVEVHNAKTKPREEQFNSTYRVVSVLTVLHQDWLNGKEYKCKVSNKGLPS SIEKTISKAKGQPREPQVYTLPPSQEEMTKNQVSLTCLVKGFYPSDIA VEWESNGQP ENNYKTTPPVLDSDGSFFLYSRLTVDKSRWQEGNVFSCSVMHEALHNHYTQKSLS LSLGKM (SEQ ID NO:405). In some embodiments, the hinge or spacer comprises a hinge encoded by a nucleotide sequence of

(SEQ ID NO: 406)
GAGAGCAAGTACGGCCCTCCCTGCCCCCCTTGCCCTGCCCCCGAGTTCCT
GGGCGGACCCAGCGTGTTCCTGTTCCCCCCCAAGCCCAAGGACACCCTGA
TGATCAGCCGGACCCCCGAGGTGACCTGTGTGGTGGTGGACGTGTCCCAG
GAGGACCCCGAGGTCCAGTTCAACTGGTACGTGGACGGCGTGGAGGTGCA
CAACGCCAAGACCAAGCCCCGGGAGGAGCAGTTCAATAGCACCTACCGGG
TGGTGTCCGTGCTGACCGTGCTGCACCAGGACTGGCTGAACGGCAAGGAA
TACAAGTGTAAGGTGTCCAACAAGGGCCTGCCCAGCAGCATCGAGAAAAC
CATCAGCAAGGCCAAGGGCCAGCCTCGGGAGCCCCAGGTGTACACCCTGC
CCCCTAGCCAAGAGGAGATGACCAAGAACCAGGTGTCCCTGACCTGCCTG
GTGAAGGGCTTCTACCCCAGCGACATCGCCGTGGAGTGGGAGAGCAACGG
CCAGCCCGAGAACAACTACAAGACCACCCCCCCTGTGCTGGACAGCGACG
GCAGCTTCTTCCTGTACAGCCGGCTGACCGTGGACAAGAGCCGGTGGCAG
GAGGGCAACGTCTTTAGCTGCTCCGTGATGCACGAGGCCCTGCACAACCA
CTACACCCAGAAGAGCCTGAGCCTGTCCCTGGGCAAGATG.

[0344] In one aspect, the hinge or spacer comprises an IgD hinge. For example, in one embodiment, the hinge or spacer comprises a hinge of the amino acid sequence RWPESPKAQASSVPTAQPQAEGSLAKATTAPATTRNTGRGGEEKKKEKEKEEQEE RETKTPECPSHTQPLGVYLLTPAVQDLWLRDKATFTCFVVGSDLKDAHLTWEVAG KVPTGGVEEGLLERHSNGSQSQHSRLTLPRSLWNAGTSVTCTLNHPSLPPQRLMAL REPAAQAPVKLSLNLLASSDPPEAASWLLCEVSGFSPPNILLMWLEDQREVNTSGF APARPPPQPGSTTFWAWSVLRVPAPPSPQPATYTCVVSHEDSRTLLNASRSLEVSYV TDH (SEQ ID NO:407). In some embodiments, the hinge or spacer comprises a hinge encoded by a nucleotide sequence of

(SEQ ID NO: 408)
AGGTGGCCCGAAAGTCCCAAGGCCCAGGCATCTAGTGTTCCTACTGCACA
GCCCCAGGCAGAAGGCAGCCTAGCCAAAGCTACTACTGCACCTGCCACTA
CGCGCAATACTGGCCGTGGCGGGGAGGAGAAGAAAAAGGAGAAAGAGAAA
GAAGAACAGGAAGAGAGGGAGACCAAGACCCCTGAATGTCCATCCCATAC
CCAGCCGCTGGGCGTCTATCTCTTGACTCCCGCAGTACAGGACTTGTGGC
TTAGAGATAAGGCCACCTTTACATGTTTCGTCGTGGGCTCTGACCTGAAG
GATGCCCATTTGACTTGGGAGGTTGCCGGAAAGGTACCCACAGGGGGGGT
TGAGGAAGGGTTGCTGGAGCGCCATTCCAATGGCTCTCAGAGCCAGCACT
CAAGACTCACCCTTCCGAGATCCCTGTGGAACGCCGGGACCTCTGTCACA
TGTACTCTAAATCATCCTAGCCTGCCCCCACAGCGTCTGATGGCCCTTAG
AGAGCCAGCCGCCCAGGCACCAGTTAAGCTTAGCCTGAATCTGCTCGCCA
GTAGTGATCCCCCAGAGGCCGCCAGCTGGCTCTTATGCGAAGTGTCCGGC
TTTAGCCCGCCCAACATCTTGCTCATGTGGCTGGAGGACCAGCGAGAAGT
GAACACCAGCGGCTTCGCTCCAGCCCGGCCCCCACCCCAGCCGGGTTCTA
CCACATTCTGGGCCTGGAGTGTCTTAAGGGTCCCAGCACCACCTAGCCCC
CAGCCAGCCACATACACCTGTGTTGTGTCCCATGAAGATAGCAGGACCCT
GCTAAATGCTTCTAGGAGTCTGGAGGTTTCCTACGTGACTGACCATT.

[0345] In one aspect, the transmembrane domain may be recombinant, in which case it will comprise predominantly hydrophobic residues such as leucine and valine. In one aspect a triplet of phenylalanine, tryptophan and valine can be found at each end of a recombinant transmembrane domain.

[0346] Optionally, a short oligo- or polypeptide linker, between 2 and 10 amino acids in length may form the linkage between the transmembrane domain and the cytoplasmic region of the CAR. A glycine-serine doublet provides a particularly suitable linker. For example, in one aspect, the linker comprises the amino acid sequence of GGGGSGGGGS (SEQ ID NO:10). In some embodiments, the linker is encoded by a nucleotide sequence of

(SEQ ID NO: 11)
GGTGGCGGAGGTTCTGGAGGTGGAGGTTCC.

[0347] In one aspect, the hinge or spacer comprises a KIR2DS2 hinge.

### Cytoplasmic Domain

[0348] The cytoplasmic domain or region of the anti-target CAR includes an intracellular signaling domain. An intracellular signaling domain is generally responsible for activation of at least one of the normal effector functions of the immune cell in which the anti-target CAR has been introduced. The term “effector function” refers to a specialized function of a cell. Effector function of a T cell, for example, may be cytolytic activity or helper activity including the secretion of cytokines. Thus the term “intracellular signaling domain” refers to the portion of a protein which transduces the effector function signal and directs the cell to perform a specialized function. While usually the entire intracellular signaling domain can be employed, in many cases it is not necessary to use the entire chain. To the extent that a truncated portion of the intracellular signaling domain is used, such truncated portion may be used in place of the intact chain as long as it transduces the effector function signal. The term intracellular signaling domain is thus meant to include any truncated portion of the intracellular signaling domain sufficient to transduce the effector function signal.

[0349] Examples of intracellular signaling domains for use in the anti-target CAR of the invention include the cytoplasmic sequences of the T cell receptor (TCR) and co-receptors that act in concert to initiate signal transduction following antigen receptor engagement, as well as any derivative or variant of these sequences and any recombinant sequence that has the same functional capability.

[0350] It is known that signals generated through the TCR alone are insufficient for full activation of the T cell and that a secondary and/or costimulatory signal is also required. Thus, T cell activation can be said to be mediated by two distinct classes of cytoplasmic signaling sequences: those that initiate antigen-dependent primary activation through the TCR (primary intracellular signaling domains) and those that act in an antigen-independent manner to provide a secondary or costimulatory signal (secondary cytoplasmic domain, e.g., a costimulatory domain).

[0351] A primary signaling domain regulates primary activation of the TCR complex either in a stimulatory way, or in an inhibitory way. Primary intracellular signaling domains that act in a stimulatory manner may contain signaling motifs which are known as immunoreceptor tyrosine-based activation motifs or ITAMs.

[0352] Examples of ITAM containing primary intracellular signaling domains that are of particular use in the invention include those of CD3 zeta, common FcR gamma (FCER1G), Fc gamma RIIa, FcR beta (Fc Epsilon R1b), CD3 gamma, CD3 delta, CD3 epsilon, CD79a, CD79b, DAP10, and DAP12. In one embodiment, a CAR of the invention comprises an intracellular signaling domain, e.g., a primary signaling domain of CD3-zeta.

[0353] In one embodiment, a primary signaling domain comprises a modified ITAM domain, e.g., a mutated ITAM domain which has altered (e.g., increased or decreased) activity as compared to the native ITAM domain. In one embodiment, a primary signaling domain comprises a modified ITAM-containing primary intracellular signaling domain, e.g., an optimized and/or truncated ITAM-containing primary intracellular signaling domain. In an embodiment, a primary signaling domain comprises one, two, three, four or more ITAM motifs.

[0354] The intracellular signalling domain of the anti-target CAR can comprise the CD3-zeta signaling domain by itself or it can be combined with any other desired intracellular signaling domain(s) useful in the context of an anti-target CAR of the invention. For example, the intracellular signaling domain of the anti-target CAR can comprise a CD3 zeta chain portion and a costimulatory signaling domain. The costimulatory signaling domain refers to a portion of the anti-target CAR comprising the intracellular domain of a costimulatory molecule. A costimulatory molecule is a cell surface molecule other than an antigen receptor or its ligands that is required for an efficient response of lymphocytes to an antigen. Examples of such molecules include CD27, CD28, 4-1BB (CD137), OX40, CD30, CD40, PD-1, ICOS, lymphocyte function-associated antigen-1 (LFA-1), CD2, CD7, LIGHT, NKG2C, B7-H3, and a ligand that specifically binds with CD83, and the like. For example, CD27 costimulation has been demonstrated to enhance expansion, effector function, and survival of human CART cells in vitro and augments human T cell persistence and antitumor activity in vivo (Song et al. Blood. 2012; 119 (3): 696-706). Further examples of such costimulatory molecules include CDS, ICAM-1, GITR, BAFFR, HVEM (LIGHTR), SLAMF7, NKp80 (KLRF1), NKp44, NKp30, NKp46, CD160, CD19, CD4, CD8alpha, CD8beta, IL2R beta, IL2R gamma, IL7R alpha, ITGA4, VLA1, CD49a, ITGA4, IA4, CD49D, ITGA6, VLA-6, CD49f, ITGAD, CD11d, ITGAE, CD103, ITGAL, CD11a, LFA-1, ITGAM, CD11b, ITGAX, CD11c, ITGB1, CD29, ITGB2, CD18, LFA-1, ITGB7, TNFR2, TRANCE/RANKL, DNAMI (CD226), SLAMF4 (CD244, 2B4), CD84, CD96 (Tactile), NKG2D, CEACAMI, CRTAM, Ly9 (CD229), CD160 (BY55), PSGL1, CD100 (SEMA4D), CD69, SLAMF6 (NTB-A, Ly108), SLAM (SLAMF1, CD150, IPO-3), BLAME (SLAMF8), SELPLG (CD162), LTBR, LAT, GADS, SLP-76, PAG/Cbp, and CD19a.

[0355] The intracellular signaling sequences within the cytoplasmic portion of the anti-target CAR of the invention may be linked to each other in a random or specified order. Optionally, a short oligo- or polypeptide linker, for example, between 2 and 10 amino acids (e.g., 2, 3, 4, 5, 6, 7, 8, 9, or 10 amino acids) in length may form the linkage between intracellular signaling sequence. In one embodiment, a glycine-serine doublet can be used as a suitable linker. In one embodiment, a single amino acid, e.g., an alanine, a glycine, can be used as a suitable linker.

[0356] In one aspect, the intracellular signaling domain is designed to comprise two or more, e.g., 2, 3, 4, 5, or more, costimulatory signaling domains. In an embodiment, the two or more, e.g., 2, 3, 4, 5, or more, costimulatory signaling domains, are separated by a linker molecule, e.g., a linker molecule described herein. In one embodiment, the intracellular signaling domain comprises two costimulatory signaling domains. In some embodiments, the linker molecule is a glycine residue. In some embodiments, the linker is an alanine residue.

[0357] In one aspect, the intracellular signaling domain is designed to comprise the signaling domain of CD3-zeta. In one aspect, the intracellular signaling domain is designed to comprise the signaling domain of CD3-zeta, and the signaling domain of 4-1BB. In one aspect, the signaling domain of 4-1BB is a signaling domain of SEQ ID NO: 14. In one aspect, the signaling domain of CD3-zeta is a signaling domain of SEQ ID NO: 18.

[0358] In one aspect, the intracellular signaling domain is designed to comprise the signaling domain of CD3-zeta, and the signaling domain of CD27. In one aspect, the signaling domain of CD27 comprises an amino acid sequence of

(SEQ ID NO: 16)
QRRKYRSNKGESPVEPAEPCRYSCPREEEGSTIPIQEDYRKPEPACSP.

[0359] In one aspect, the signalling domain of CD27 is encoded by a nucleic acid sequence of

(SEQ ID NO: 17)
AGGAGTAAGAGGAGCAGGCTCCTGCACAGTGACTACATGAACATGACTCC
CCGCCGCCCCGGGCCCACCCGCAAGCATTACCAGCCCTATGCCCCACCAC
GCGACTTCGCAGCCTATCGCTCC.

[0360] In one embodiment, the anti-target CAR-expressing cell further comprises an inhibitory CAR. In one embodiment, the inhibitory CAR comprises an antigen binding domain that binds an antigen found on normal cells but not cancer cells. In one embodiment, the inhibitory CAR comprises the antigen binding domain, a transmembrane domain and an intracellular domain of an inhibitory molecule. For example, the intracellular domain of the inhibitory CAR can be an intracellular domain of PD1, PD-L1, CTLA4, TIM3, CEACAM (e.g., CEACAM-1, CEACAM-3 and/or CEACAM-5), LAG3, VISTA, BTLA, TIGIT, LAIR1, CD160, 2B4 or TGF beta.

[0361] In one embodiment, when the anti-target CAR-expressing cell comprises two or more different CARs, the extracellular domains of the different CARs can be such that the extracellular domains do not interact with one another. For example, a cell expressing a first and second CAR can have an extracellular domain of the first CAR, e.g., as a fragment, e.g., an scFv, that does not form an association with the extracellular domain of the second CAR, e.g., the antigen binding domain of the second CAR is a VHH.

[0362] In some embodiments, the ligand of an anti-target CAR comprises a single domain antigen binding (SDAB) molecules which includes molecules whose complementary determining regions are part of a single domain polypeptide. Examples include, but are not limited to, heavy chain variable domains, binding molecules naturally devoid of light chains, single domains derived from conventional 4-chain antibodies, engineered domains and single domain scaffolds other than those derived from antibodies. SDAB molecules may be any of the art, or any future single domain molecules. SDAB molecules may be derived from any species including, but not limited to mouse, human, camel, llama, lamprey, fish, shark, goat, rabbit, and bovine. This term also includes naturally occurring single domain antibody molecules from species other than Camelidae and sharks.

[0363] In one aspect, an SDAB molecule can be derived from a variable region of the immunoglobulin found in fish, such as, for example, that which is derived from the immunoglobulin isotype known as Novel Antigen Receptor (NAR) found in the serum of shark. Methods of producing single domain molecules derived from a variable region of NAR (“IgNARs”) are described in WO 03/014161 and Streltsov (2005) Protein Sci. 14:2901-2909.

[0364] According to another aspect, an SDAB molecule is a naturally occurring single domain antigen binding molecule known as heavy chain devoid of light chains. Such single domain molecules are disclosed in WO 9404678 and Hamers-Casterman, C. et al. (1993) Nature 363:446-448, for example. For clarity reasons, this variable domain derived from a heavy chain molecule naturally devoid of light chain is known herein as a VHH or nanobody to distinguish it from the conventional VH of four chain immunoglobulins. Such a VHH molecule can be derived from Camelidae species, for example in camel, llama, dromedary, alpaca and guanaco. Other species besides Camelidae may produce heavy chain molecules naturally devoid of light chain; such VHHs are within the scope of the invention.

[0365] The SDAB molecules can be recombinant, CDR-grafted, humanized, camelized, de-immunized and/or in vitro generated (e.g., selected by phage display).

[0366] In another aspect, the anti-target CAR-expressing cell described herein can further express another agent, e.g., an agent which enhances the activity of an anti-target CAR-expressing cell. For example, in one embodiment, the agent can be an agent which inhibits an inhibitory molecule. Inhibitory molecules, e.g., PD1, can, in some embodiments, decrease the ability of an anti-target CAR-expressing cell to mount an immune effector response. Examples of inhibitory molecules include PD1, PD-L1, CTLA4, TIM3, CEACAM (e.g., CEACAM-1, CEACAM-3 and/or CEACAM-5), LAG3, VISTA, BTLA, TIGIT, LAIR1, CD160, 2B4 and TGF beta. In one embodiment, the agent which inhibits an inhibitory molecule, e.g., is a molecule described herein, e.g., an agent that comprises a first polypeptide, e.g., an inhibitory molecule, associated with a second polypeptide that provides a positive signal to the cell, e.g., an intracellular signaling domain described herein. In one embodiment, the agent comprises a first polypeptide, e.g., of an inhibitory molecule such as PD1, PD-L1, CTLA4, TIM3, CEACAM (e.g., CEACAM-1, CEACAM-3 and/or CEACAM-5), LAG3, VISTA, BTLA, TIGIT, LAIR1, CD160, 2B4 or TGF beta, or a fragment of any of these (e.g., at least a portion of an extracellular domain of any of these), and a second polypeptide which is an intracellular signaling domain described herein (e.g., comprising a costimulatory domain (e.g., 41BB, CD27 or CD28, e.g., as described herein) and/or a primary signaling domain (e.g., a CD3 zeta signaling domain described herein). In one embodiment, the agent comprises a first polypeptide of PD1 or a fragment thereof (e.g., at least a portion of an extracellular domain of PD1), and a second polypeptide of an intracellular signaling domain described herein (e.g., a CD28 signaling domain described herein and/or a CD3 zeta signaling domain described herein). PD1 is an inhibitory member of the CD28 family of receptors that also includes CD28, CTLA-4, ICOS, and BTLA. PD-1 is expressed on activated B cells, T cells and myeloid cells (Agata et al. 1996 Int. Immunol 8:765-75). Two ligands for PD1, PD-L1 and PD-L2 have been shown to downregulate T cell activation upon binding to PD1 (Freeman et a. 2000 J Exp Med 192:1027-34; Latchman et al. 2001 Nat Immunol 2:261-8; Carter et al. 2002 Eur J Immunol 32:634-43). PD-L1 is abundant in human cancers (Dong et al. 2003 J Mol Med 81:281-7; Blank et al. 2005 Cancer Immunol. Immunother 54:307-314; Konishi et al. 2004 Clin Cancer Res 10:5094). Immune suppression can be reversed by inhibiting the local interaction of PD1 with PD-L1.

[0367] In one embodiment, the agent comprises the extracellular domain (ECD) of an inhibitory molecule, e.g., Programmed Death 1 (PD1), fused to a transmembrane domain and intracellular signaling domains such as 41BB and CD3 zeta (also referred to herein as a PD1 CAR). In one embodiment, a PD1 CAR, when used in combinations with an anti-target CAR described herein, improves the persistence of the T cell. In one embodiment, the CAR is a PD1 CAR comprising the extracellular domain of PD1 indicated as underlined in SEQ ID NO: 26. In one embodiment, the PD1 CAR comprises the amino acid sequence of SEQ ID NO: 26.

(SEQ ID NO: 26)
Malpvtalllplalllhaarppgwfldspdrpwnpptfspallvvtegdn
atftcsfsntsesfylnwyrmspsnqtdklaafpedrsqpgqdcrfrvtq
lpngrdfhmsvvrarrndsgtylcgaislapkaqikeslraelrvterra
evptahpspsprpagqfqtlvtttpaprpptpaptiasqplslrpeacrp
aaggavhtrgldfacdiyiwaplagtcgvlllslvitlyckrgrkkllyi
fkqpfmrpvqttqeedgcscrfpeeeeggcelrvkfsrsadapaykqgqn
qlynelnlgrreeydvldkrrgrdpemggkprrknpqeglynelqkdkma
eayseigmkgerrrgkghdglyqglstatkdtydalhmqalppr.

[0368] In one embodiment, the PD1 CAR comprises the amino acid sequence provided below (SEQ ID NO:39).

(SEQ ID NO: 39)
pgwfldspdrpwnpptfspallvvtegdnatftcsfsntsesfylnwyrm
spsnqtdklaafpedrsqpgqdcrfrvtqlpngrdfhmsvvrarrndsgt
ylcgaislapkaqikeshaelrvterraevptahpspsprpagqfqtlvt
ttpaprpptpaptiasqplslrpeacrpaaggavhtrgldfacdiyiwap
lagtegvlllslvitlyckrgrkkllyifkqpfmrpvqttqeedgcscrf
peeeeggcelrvkfsrsadapaykqgqnqlynelnlgrreeydvldkrrg
rdpemggkprrknpqeglynelqkdkmaeayseigmkgerrrgkghdgly
qglstatkdtydalhmqalppr.

[0369] In one embodiment, the agent comprises a nucleic acid sequence encoding the PD1 CAR, e.g., the PD1 CAR described herein. In one embodiment, the nucleic acid sequence for the PD1 CAR is shown below, with the PD1 ECD underlined below in SEQ ID NO: 27

(SEQ ID NO: 27)
atggccctccctgtcactgccctgatctccccctcgcactcctgctccac
gccgctagaccacccggatggtactggactctccggatcgcccgtggaat
cccccaaccactcaccggcactcaggagtgactgagggcgataatgcgac
cacacgtgctcgttctccaacacctccgaatcattcgtgctgaactggta
ccgcatgagcccgtcaaaccagaccgacaagctcgccgcgtaccggaaga
tcggtcgcaaccgggacaggattgtcggaccgcgtgactcaactgccgaa
tggcagagacttccacatgagcgtggtccgcgctaggcgaaacgactccg
ggacctacctgtgcggagccatctcgctggcgcctaaggcccaaatcaaa
gagagcttgagggccgaactgagagtgaccgagcgcagagctgaggtgcc
aactgcacatccatccccatcgcctcggcctgcggggcagatcagaccct
ggtcacgaccactccggcgccgcgcccaccgactccggccccaactatcg
cgagccagcccctgtcgctgaggccggaagcatgccgccctgccgccgga
ggtgctgtgcatacccggggattggacttcgcatgcgacatctacatttg
ggctcctctcgccggaacttgtggcgtgctccttctgtccctggtcatca
ccctgtactgcaagcggggtcggaaaaagcttctgtacattttcaagcag
cccttcatgaggcccgtgcaaaccacccaggaggaggacggttgctcctg
ccggttccccgaagaggaagaaggaggttgcgagctgcgcgtgaagactc
ccggagcgccgacgcccccgcctataagcagggccagaaccagctgtaca
acgaactgaacctgggacggcgggaagagtacgatgtgctggacaagcgg
cgcggccgggaccccgaaatgggcgggaagcctagaagaaagaaccctca
ggaaggcctgtataacgagctgcagaaggacaagatggccgaggcctact
ccgaaattgggatgaagggagagcggcggaggggaaaggggcacgacggc
ctgtaccaaggactgtccaccgccaccaaggacacatacgatgccctgca
catgcaggccatccccctcgc.

[0370] In one aspect, the present invention provides methods comprising administering a population of anti-target CAR-expressing cells, e.g., anti-target CAR CART cells, in combination with another agent, e.g., a kinase inhibitor, such as a kinase inhibitor described herein. In another aspect, the present invention provides methods comprising administering a population of cells wherein at least one cell in the population expresses an anti-target CAR having a ligand that binds a target CAR, and a second cell expressing another agent, e.g., an agent which enhances the activity of an anti-target CAR-expressing cell, in combination with another agent, e.g., a kinase inhibitor, such as a kinase inhibitor described herein.

### Regulatable Anti-Target CARs

[0371] In some embodiments, a regulatable anti-target CAR (atRCAR) where the anti-target CAR activity can be controlled is desirable to optimize the safety and efficacy of an anti-target CAR therapy. There are many ways anti-target CAR activities can be regulated. For example, inducible apoptosis using, e.g., a caspase fused to a dimerization domain (see, e.g., Di et al., N Egnl. J. Med. 2011 Nov. 3; 365 (18): 1673-1683), can be used as a safety switch in the anti-target CAR therapy of the instant invention. In an aspect, an anti-target RCAR comprises a set of polypeptides, typically two in the simplest embodiments, in which the components of a standard anti-target CAR described herein, e.g., an antigen binding domain and an intracellular signaling domain, are partitioned on separate polypeptides or members. In some embodiments, the set of polypeptides include a dimerization switch that, upon the presence of a dimerization molecule, can couple the polypeptides to one another, e.g., can couple an antigen binding domain to an intracellular signaling domain.

[0372] In an aspect, an anti-target RCAR comprises two polypeptides or members: 1) an intracellular signaling member comprising an intracellular signaling domain, e.g., a primary intracellular signaling domain described herein, and a first switch domain; 2) a ligand that binds a target CAR wherein the ligand comprises a cognate antigen or an antibody molecule, as described herein and a second switch domain. Optionally, the anti-target RCAR comprises a transmembrane domain described herein. In an embodiment, a transmembrane domain can be disposed on the intracellular signaling member, on the antigen binding member, or on both. (Unless otherwise indicated, when members or elements of an anti-target RCAR are described herein, the order can be as provided, but other orders are included as well. In other words, in an embodiment, the order is as set out in the text, but in other embodiments, the order can be different. E.g., the order of elements on one side of a transmembrane region can be different from the example, e.g., the placement of a switch domain relative to a intracellular signaling domain can be different, e.g., reversed).

[0373] In an embodiment, the first and second switch domains can form an intracellular or an extracellular dimerization switch. In an embodiment, the dimerization switch can be a homodimerization switch, e.g., where the first and second switch domain are the same, or a heterodimerization switch, e.g., where the first and second switch domain are different from one another.

[0374] In embodiments, an anti-target RCAR can comprise a “multi switch.” A multi switch can comprise heterodimerization switch domains or homodimerization switch domains. A multi switch comprises a plurality of, e.g., 2, 3, 4, 5, 6, 7, 8, 9, or 10, switch domains, independently, on a first member, e.g., a ligand member, and a second member, e.g., an intracellular signaling member. In an embodiment, the first member can comprise a plurality of first switch domains, e.g., FKBP-based switch domains, and the second member can comprise a plurality of second switch domains, e.g., FRB-based switch domains. In an embodiment, the first member can comprise a first and a second switch domain, e.g., a FKBP-based switch domain and a FRB-based switch domain, and the second member can comprise a first and a second switch domain, e.g., a FKBP-based switch domain and a FRB-based switch domain.

[0375] In an embodiment, the intracellular signaling member comprises one or more intracellular signaling domains, e.g., a primary intracellular signaling domain and one or more costimulatory signaling domains.

[0376] In an embodiment, the ligand member may comprise one or more intracellular signaling domains, e.g., one or more costimulatory signaling domains. In an embodiment, the ligand member comprises a plurality, e.g., 2 or 3 costimulatory signaling domains described herein, e.g., selected from 41BB, CD28, CD27, ICOS, and OX40, and in embodiments, no primary intracellular signaling domain. In an embodiment, the ligand member comprises the following costimulatory signaling domains, from the extracellular to intracellular direction: 41BB-CD27; 41BB-CD27; CD27-41BB; 41BB-CD28; CD28-41BB; OX40-CD28; CD28-OX40; CD28-41BB; or 41BB-CD28. In such embodiments, the intracellular binding member comprises a CD3zeta domain. In one such embodiment the anti-target RCAR comprises (1) a ligand member comprising, a ligand that binds a target CAR, a transmembrane domain, and two costimulatory domains and a first switch domain; and (2) an intracellular signaling domain comprising a transmembrane domain or membrane tethering domain and at least one primary intracellular signaling domain, and a second switch domain.

[0377] An embodiment provides anti-target RCARs wherein the ligand member is not tethered to the surface of the anti-target CAR cell. This allows a cell having an intracellular signaling member to be conveniently paired with one or more ligand members, without transforming the cell with a sequence that encodes the ligand member. In such embodiments, the anti-target RCAR comprises: 1) an intracellular signaling member comprising: a first switch domain, a transmembrane domain, an intracellular signaling domain, e.g., a primary intracellular signaling domain, and a first switch domain; and 2) a ligand member comprising: a ligand that binds a target CAR, and a second switch domain, wherein the ligand member does not comprise a transmembrane domain or membrane tethering domain, and, optionally, does not comprise an intracellular signaling domain. In some embodiments, the anti-target RCAR may further comprise 3) a second ligand member comprising: a ligand that binds a target CAR, e.g., a second ligand that binds a different target CAR than is bound by the ligand domain; and a second switch domain.

[0378] Also provided herein are anti-target RCARs wherein the ligand member comprises bispecific activation and targeting capacity. In this embodiment, the ligand member can comprise a plurality, e.g., 2, 3, 4, or 5 ligands, e.g., scFvs, wherein each ligand binds to a target CAR, e.g. different target CARs or the same target CAR, e.g., the same or different portions of the extracellular domain of the same target CAR. In an embodiment, the plurality of ligands are in tandem, and optionally, a linker or hinge region is disposed between each of the ligands. Suitable linkers and hinge regions are described herein.

[0379] An embodiment provides anti-target RCARs having a configuration that allows switching of proliferation. In this embodiment, the anti-target RCAR comprises: 1) an intracellular signaling member comprising: optionally, a transmembrane domain or membrane tethering domain; one or more co-stimulatory signaling domain, e.g., selected from 41BB, CD28, CD27, ICOS, and OX40, and a switch domain; and 2) a ligand member comprising ligand that binds to a target CAR, a transmembrane domain, and a primary intracellular signaling domain, e.g., a CD3zeta domain, wherein the ligand member does not comprise a switch domain, or does not comprise a switch domain that dimerizes with a switch domain on the intracellular signaling member. In an embodiment, the ligand member does not comprise a co-stimulatory signaling domain. In an embodiment, the intracellular signaling member comprises a switch domain from a homodimerization switch. In an embodiment, the intracellular signaling member comprises a first switch domain of a heterodimerization switch and the anti-target RCAR comprises a second intracellular signaling member which comprises a second switch domain of the heterodimerization switch. In such embodiments, the second intracellular signaling member comprises the same intracellular signaling domains as the intracellular signaling member. In an embodiment, the dimerization switch is intracellular. In an embodiment, the dimerization switch is extracellular.

[0380] In any of the anti-target RCAR configurations described here, the first and second switch domains comprise a FKBP-FRB based switch as described herein.

[0381] Also provided herein are cells comprising an anti-target RCAR described herein.

[0382] Also provided herein are nucleic acids and vectors comprising an anti-target RCAR encoding sequences. Sequence encoding various elements of an anti-target RCAR can be disposed on the same nucleic acid molecule, e.g., the same plasmid or vector, e.g., viral vector, e.g., lentiviral vector. In an embodiment, (i) sequence encoding a ligand member and (ii) sequence encoding an intracellular signaling member, can be present on the same nucleic acid, e.g., vector. Production of the corresponding proteins can be achieved, e.g., by the use of separate promoters, or by the use of a bicistronic transcription product (which can result in the production of two proteins by cleavage of a single translation product or by the translation of two separate protein products). In an embodiment, a sequence encoding a cleavable peptide, e.g., a P2A or F2A sequence, is disposed between (i) and (ii). In an embodiment, a sequence encoding an IRES, e.g., an EMCV or EV71 IRES, is disposed between (i) and (ii). In these embodiments, (i) and (ii) are transcribed as a single RNA. In an embodiment, a first promoter is operably linked to (i) and a second promoter is operably linked to (ii), such that (i) and (ii) are transcribed as separate mRNAs.

[0383] Alternatively, the sequence encoding various elements of an anti-target RCAR can be disposed on the different nucleic acid molecules, e.g., different plasmids or vectors, e.g., viral vector, e.g., lentiviral vector. E.g., the (i) sequence encoding a ligand member can be present on a first nucleic acid, e.g., a first vector, and the (ii) sequence encoding an intracellular signaling member can be present on the second nucleic acid, e.g., the second vector.

### Target CAR

[0384] In one embodiment, methods of the invention comprise a target CAR. In an embodiment, a target CAR comprises a specific binding element otherwise referred to as an antigen binding domain. The choice of moiety depends upon the type and number of ligands that define the surface of a target cell. For example, the antigen binding domain may be chosen to recognize a cell surface marker on target cells associated with a particular disease state. Thus, examples of cell surface markers that may be bound by the antigen binding domain in a CAR described herein include those associated with viral, bacterial and parasitic infections, autoimmune disease and cancer cells. In one aspect, the portion of the target CAR comprising the antigen binding domain comprises an antigen binding domain that targets a tumor antigen, e.g., a tumor antigen described herein.

[0385] The antigen binding domain can be any domain that binds to the antigen including but not limited to a monoclonal antibody, a polyclonal antibody, a recombinant antibody, a human antibody, a humanized antibody, and a functional fragment thereof, including but not limited to a single-domain antibody such as a heavy chain variable domain (VH), a light chain variable domain (VL) and a variable domain (VHH) of camelid derived nanobody, and to an alternative scaffold known in the art to function as antigen binding domain, such as a recombinant fibronectin domain, a T cell receptor (TCR), or a fragment there of, e.g., single chain TCR, and the like. In some instances, it is beneficial for the antigen binding domain to be derived from the same species in which the CAR will ultimately be used in. For example, for use in humans, it may be beneficial for the antigen binding domain of the CAR to comprise human or humanized residues for the antigen binding domain of an antibody or antibody fragment.

[0386] In one embodiment, an antigen binding domain against CD22 is an antigen binding portion, e.g., CDRs, of an antibody described in, e.g., Haso et al., Blood, 121 (7): 1165-1174 (2013); Wayne et al., Clin Cancer Res 16 (6): 1894-1903 (2010); Kato et al., Leuk Res 37 (1): 83-88 (2013); Creative BioMart (creativebiomart.net): MOM-18047-S(P).

[0387] In one embodiment, an antigen binding domain against CS-1 is an antigen binding portion, e.g., CDRs, of Elotuzumab (BMS), see e.g., Tai et al., 2008, Blood 112 (4): 1329-37; Tai et al., 2007, Blood. 110 (5): 1656-63.

[0388] In one embodiment, an antigen binding domain against CLL-1 is an antigen binding portion, e.g., CDRs, of an antibody available from R&D, ebiosciences, Abcam, for example, PE-CLL1-hu Cat #353604 (BioLegend); and PE-CLL1 (CLEC12A) Cat #562566 (BD).

[0389] In one embodiment, an antigen binding domain against CD33 is an antigen binding portion, e.g., CDRs, of an antibody described in, e.g., Bross et al., Clin Cancer Res 7 (6): 1490-1496 (2001) (Gemtuzumab Ozogamicin, hP67.6),Caron et al., Cancer Res 52 (24): 6761-6767 (1992) (Lintuzumab, HuM195), Lapusan et al., Invest New Drugs 30 (3): 1121-1131 (2012) (AVE9633), Aigner et al., Leukemia 27 (5): 1107-1115 (2013) (AMG330, CD33 BiTE), Dutour et al., Adv hematol 2012:683065 (2012), and Pizzitola et al., Leukemia doi: 10.1038/Lue. 2014.62 (2014).

[0390] In one embodiment, an antigen binding domain against GD2 is an antigen binding portion, e.g., CDRs, of an antibody described in, e.g., Mujoo et al., Cancer Res. 47 (4): 1098-1104 (1987); Cheung et al., Cancer Res 45 (6): 2642-2649 (1985), Cheung et al., J Clin Oncol 5 (9): 1430-1440 (1987), Cheung et al., J Clin Oncol 16 (9): 3053-3060 (1998), Handgretinger et al., Cancer Immunol Immunother 35 (3): 199-204 (1992). In some embodiments, an antigen binding domain against GD2 is an antigen binding portion of an antibody selected from mAb 14.18, 14G2a, ch14.18, hu14.18, 3F8, hu3F8, 3G6, 8B6, 60C3, 10B8, ME36.1, and 8H9, see e.g., WO2012033885, WO2013040371, WO2013192294, WO2013061273, WO2013123061, WO2013074916, and WO201385552. In some embodiments, an antigen binding domain against GD2 is an antigen binding portion of an antibody described in US Publication No.: 20100150910 or PCT Publication No.: WO 2011160119.

[0391] In one embodiment, an antigen binding domain against BCMA is an antigen binding portion, e.g., CDRs, of an antibody described in, e.g., WO2012163805, WO200112812, and WO2003062401.

[0392] In one embodiment, an antigen binding domain against Tn antigen is an antigen binding portion, e.g., CDRs, of an antibody described in, e.g., U.S. Pat. No. 8,440,798, Brooks et al., PNAS 107 (22): 10056-10061 (2010), and Stone et al., OncoImmunology 1 (6): 863-873 (2012).

[0393] In one embodiment, an antigen binding domain against PSMA is an antigen binding portion, e.g., CDRs, of an antibody described in, e.g., Parker et al., Protein Expr Purif 89 (2): 136-145 (2013), US20110268656 (J591 ScFv); Frigerio et al, European J Cancer 49 (9): 2223-2232 (2013) (scFvD2B); WO 2006125481 (mAbs 3/A12, 3/E7 and 3/F11) and single chain antibody fragments (scFv A5 and D7).

[0394] In one embodiment, an antigen binding domain against ROR1 is an antigen binding portion, e.g., CDRs, of an antibody described in, e.g., Hudecek et al., Clin Cancer Res 19 (12): 3153-3164 (2013); WO 2011159847; and US20130101607.

[0395] In one embodiment, an antigen binding domain against FLT3 is an antigen binding portion, e.g., CDRs, of an antibody described in, e.g., WO2011076922, U.S. Pat. No. 5,777,084, EP0754230, US20090297529, and several commercial catalog antibodies (R&D, ebiosciences, Abcam).

[0396] In one embodiment, an antigen binding domain against TAG72 is an antigen binding portion, e.g., CDRs, of an antibody described in, e.g., Hombach et al., Gastroenterology 113 (4): 1163-1170 (1997); and Abcam ab691.

[0397] In one embodiment, an antigen binding domain against FAP is an antigen binding portion, e.g., CDRs, of an antibody described in, e.g., Ostermann et al., Clinical Cancer Research 14:4584-4592 (2008) (FAP5), US Pat. Publication No. 2009/0304718; sibrotuzumab (see e.g., Hofheinz et al., Oncology Research and Treatment 26 (1), 2003); and Tran et al., J Exp Med 210 (6): 1125-1135 (2013).

[0398] In one embodiment, an antigen binding domain against CD38 is an antigen binding portion, e.g., CDRs, of daratumumab (see, e.g., Groen et al., Blood 116 (21): 1261-1262 (2010); MOR202 (see, e.g., U.S. Pat. No. 8,263,746); or antibodies described in U.S. Pat. No. 8,362,211.

[0399] In one embodiment, an antigen binding domain against CD44v6 is an antigen binding portion, e.g., CDRs, of an antibody described in, e.g., Casucci et al., Blood 122 (20): 3461-3472 (2013).

[0400] In one embodiment, an antigen binding domain against CEA is an antigen binding portion, e.g., CDRs, of an antibody described in, e.g., Chmielewski et al., Gastoenterology 143 (4): 1095-1107 (2012).

[0401] In one embodiment, an antigen binding domain against EPCAM is an antigen binding portion, e.g., CDRS, of an antibody selected from MT110, EpCAM-CD3 bispecific Ab (see, e.g., clinicaltrials.gov/ct2/show/NCT00635596); Edrecolomab; 3622W94; ING-1; and adecatumumab (MT201).

[0402] In one embodiment, an antigen binding domain against PRSS21 is an antigen binding portion, e.g., CDRs, of an antibody described in U.S. Pat. No. 8,080,650.

[0403] In one embodiment, an antigen binding domain against B7H3 is an antigen binding portion, e.g., CDRs, of an antibody MGA271 (Macrogenics).

[0404] In one embodiment, an antigen binding domain against KIT is an antigen binding portion, e.g., CDRs, of an antibody described in, e.g., U.S. Pat. No. 7,915,391, US20120288506, and several commercial catalog antibodies.

[0405] In one embodiment, an antigen binding domain against IL-13Ra2 is an antigen binding portion, e.g., CDRs, of an antibody described in, e.g., WO2008/146911, WO2004087758, several commercial catalog antibodies, and WO2004087758.

[0406] In one embodiment, an antigen binding domain against CD30 is an antigen binding portion, e.g., CDRs, of an antibody described in, e.g., U.S. Pat. No. 7,090,843 B1, and EP0805871.

[0407] In one embodiment, an antigen binding domain against GD3 is an antigen binding portion, e.g., CDRs, of an antibody described in, e.g., U.S. Pat. Nos. 7,253,263; 8,207,308; 20,120,276046; EP1013761; WO2005035577; and U.S. Pat. No. 6,437,098.

[0408] In one embodiment, an antigen binding domain against CD171 is an antigen binding portion, e.g., CDRs, of an antibody described in, e.g., Hong et al., J Immunother 37 (2): 93-104 (2014).

[0409] In one embodiment, an antigen binding domain against IL-11Ra is an antigen binding portion, e.g., CDRs, of an antibody available from Abcam (cat #ab55262) or Novus Biologicals (cat #EPR5446). In another embodiment, an antigen binding domain again IL-11Ra is a peptide, see, e.g., Huang et al., Cancer Res 72 (1): 271-281 (2012).

[0410] In one embodiment, an antigen binding domain against PSCA is an antigen binding portion, e.g., CDRs, of an antibody described in, e.g., Morgenroth et al., Prostate 67 (10): 1121-1131 (2007) (scFv 7F5); Nejatollahi et al., J of Oncology 2013 (2013), article ID 839831 (scFv C5-II); and US Pat Publication No. 20090311181.

[0411] In one embodiment, an antigen binding domain against VEGFR2 is an antigen binding portion, e.g., CDRs, of an antibody described in, e.g., Chinnasamy et al., J Clin Invest 120 (11): 3953-3968 (2010).

[0412] In one embodiment, an antigen binding domain against LewisY is an antigen binding portion, e.g., CDRs, of an antibody described in, e.g., Kelly et al., Cancer Biother Radiopharm 23 (4): 411-423 (2008) (hu3S193 Ab (scFvs)); Dolezal et al., Protein Engineering 16 (1): 47-56 (2003) (NC10 scFv).

[0413] In one embodiment, an antigen binding domain against CD24 is an antigen binding portion, e.g., CDRs, of an antibody described in, e.g., Maliar et al., Gastroenterology 143 (5): 1375-1384 (2012).

[0414] In one embodiment, an antigen binding domain against PDGFR-beta is an antigen binding portion, e.g., CDRs, of an antibody Abcam ab32570.

[0415] In one embodiment, an antigen binding domain against SSEA-4 is an antigen binding portion, e.g., CDRs, of antibody MC813 (Cell Signaling), or other commercially available antibodies.

[0416] In one embodiment, an antigen binding domain against CD20 is an antigen binding portion, e.g., CDRs, of the antibody Rituximab, Ofatumumab, Ocrelizumab, Veltuzumab, or GA101.

[0417] In one embodiment, an antigen binding domain against Folate receptor alpha is an antigen binding portion, e.g., CDRs, of the antibody IMGN853, or an antibody described in US20120009181; U.S. Pat. No. 4,851,332, LK26: U.S. Pat. No. 5,952,484.

[0418] In one embodiment, an antigen binding domain against ERBB2 (Her2/neu) is an antigen binding portion, e.g., CDRs, of the antibody trastuzumab, or pertuzumab.

[0419] In one embodiment, an antigen binding domain against MUC1 is an antigen binding portion, e.g., CDRs, of the antibody SAR566658.

[0420] In one embodiment, the antigen binding domain against EGFR is antigen binding portion, e.g., CDRs, of the antibody cetuximab, panitumumab, zalutumumab, nimotuzumab, or matuzumab.

[0421] In one embodiment, an antigen binding domain against NCAM is an antigen binding portion, e.g., CDRs, of the antibody clone 2-2B: MAB5324 (EMD Millipore)

[0422] In one embodiment, an antigen binding domain against Ephrin B2 is an antigen binding portion, e.g., CDRs, of an antibody described in, e.g., Abengozar et al., Blood 119 (19): 4565-4576 (2012).

[0423] In one embodiment, an antigen binding domain against IGF-I receptor is an antigen binding portion, e.g., CDRs, of an antibody described in, e.g., U.S. Pat. No. 8,344,112 B2; EP2322550 A1; WO 2006/138315, or PCT/US2006/022995.

[0424] In one embodiment, an antigen binding domain against CAIX is an antigen binding portion, e.g., CDRs, of the antibody clone 303123 (R&D Systems).

[0425] In one embodiment, an antigen binding domain against LMP2 is an antigen binding portion, e.g., CDRs, of an antibody described in, e.g., U.S. Pat. No. 7,410,640, or US20050129701.

[0426] In one embodiment, an antigen binding domain against gp100 is an antigen binding portion, e.g., CDRs, of the antibody HMB45, NKIbetaB, or an antibody described in WO2013165940, or US20130295007

[0427] In one embodiment, an antigen binding domain against tyrosinase is an antigen binding portion, e.g., CDRs, of an antibody described in, e.g., US5843674; or US19950504048.

[0428] In one embodiment, an antigen binding domain against EphA2 is an antigen binding portion, e.g., CDRs, of an antibody described in, e.g., Yu et al., Mol Ther 22 (1): 102-111 (2014).

[0429] In one embodiment, an antigen binding domain against GD3 is an antigen binding portion, e.g., CDRs, of an antibody described in, e.g., U.S. Pat. Nos. 7,253,263; 8,207,308; 20,120,276046; EP1013761 A3; 20120276046; WO2005035577; or U.S. Pat. No. 6,437,098.

[0430] In one embodiment, an antigen binding domain against fucosyl GM1 is an antigen binding portion, e.g., CDRs, of an antibody described in, e.g., US20100297138; or WO2007/067992.

[0431] In one embodiment, an antigen binding domain against sLe is an antigen binding portion, e.g., CDRs, of the antibody G193 (for lewis Y), see Scott A M et al, Cancer Res 60:3254-61 (2000), also as described in Neeson et al, J Immunol May 2013 190 (Meeting Abstract Supplement) 177.10.

[0432] In one embodiment, an antigen binding domain against GM3 is an antigen binding portion, e.g., CDRs, of the antibody CA 2523449 (mAb 14F7).

[0433] In one embodiment, an antigen binding domain against HMWMAA is an antigen binding portion, e.g., CDRs, of an antibody described in, e.g., Kmiecik et al., Oncoimmunology 3 (1): e27185 (2014) (PMID: 24575382) (mAb9.2.27); U.S. Pat. No. 6,528,481; WO2010033866; or US20140004124.

[0434] In one embodiment, an antigen binding domain against o-acetyl-GD2 is an antigen binding portion, e.g., CDRs, of the antibody 8B6.

[0435] In one embodiment, an antigen binding domain against TEM1/CD248 is an antigen binding portion, e.g., CDRs, of an antibody described in, e.g., Marty et al., Cancer Lett 235 (2): 298-308 (2006); Zhao et al., J Immunol Methods 363 (2): 221-232 (2011).

[0436] In one embodiment, an antigen binding domain against CLDN6 is an antigen binding portion, e.g., CDRs, of the antibody IMAB027 (Ganymed Pharmaceuticals), see e.g., clinicaltrial.gov/show/NCT02054351.

[0437] In one embodiment, an antigen binding domain against TSHR is an antigen binding portion, e.g., CDRs, of an antibody described in, e.g., U.S. Pat. Nos. 8,603,466; 8,501,415; or U.S. Pat. No. 8,309,693.

[0438] In one embodiment, an antigen binding domain against GPRC5D is an antigen binding portion, e.g., CDRs, of the antibody FAB6300A (R&D Systems); or LS-A4180 (Lifespan Biosciences).

[0439] In one embodiment, an antigen binding domain against CD97 is an antigen binding portion, e.g., CDRs, of an antibody described in, e.g., U.S. Pat. No. 6,846,911; de Groot et al., J Immunol 183 (6): 4127-4134 (2009); or an antibody from R&D: MAB3734.

[0440] In one embodiment, an antigen binding domain against ALK is an antigen binding portion, e.g., CDRs, of an antibody described in, e.g., Mino-Kenudson et al., Clin Cancer Res 16 (5): 1561-1571 (2010).

[0441] In one embodiment, an antigen binding domain against polysialic acid is an antigen binding portion, e.g., CDRs, of an antibody described in, e.g., Nagae et al., J Biol Chem 288 (47): 33784-33796 (2013).

[0442] In one embodiment, an antigen binding domain against PLAC1 is an antigen binding portion, e.g., CDRs, of an antibody described in, e.g., Ghods et al., Biotechnol Appl Biochem 2013 doi: 10.1002/bab. 1177.

[0443] In one embodiment, an antigen binding domain against GloboH is an antigen binding portion of the antibody VK9; or an antibody described in, e.g., Kudryashov V et al, Glycoconj J.15 (3): 243-9 (1998), Lou et al., Proc Natl Acad Sci USA 111 (7): 2482-2487 (2014); MBr1: Bremer E-G et al. J Biol Chem 259:14773-14777 (1984).

[0444] In one embodiment, an antigen binding domain against NY-BR-1 is an antigen binding portion, e.g., CDRs of an antibody described in, e.g., Jager et al., Appl Immunohistochem Mol Morphol 15 (1): 77-83 (2007).

[0445] In one embodiment, an antigen binding domain against WT-1 is an antigen binding portion, e.g., CDRs, of an antibody described in, e.g., Dao et al., Sci Transl Med 5 (176): 176ra33 (2013); or WO2012/135854.

[0446] In one embodiment, an antigen binding domain against MAGE-A1 is an antigen binding portion, e.g., CDRs, of an antibody described in, e.g., Willemsen et al., J Immunol 174 (12): 7853-7858 (2005) (TCR-like scFv).

[0447] In one embodiment, an antigen binding domain against sperm protein 17 is an antigen binding portion, e.g., CDRs, of an antibody described in, e.g., Song et al., Target Oncol 2013 Aug. 14 (PMID: 23943313); Song et al., Med Oncol 29 (4): 2923-2931 (2012).

[0448] In one embodiment, an antigen binding domain against Tie 2 is an antigen binding portion, e.g., CDRs, of the antibody AB33 (Cell Signaling Technology).

[0449] In one embodiment, an antigen binding domain against MAD-CT-2 is an antigen binding portion, e.g., CDRs, of an antibody described in, e.g., PMID: 2450952; U.S. Pat. No. 7,635,753.

[0450] In one embodiment, an antigen binding domain against Fos-related antigen 1 is an antigen binding portion, e.g., CDRs, of the antibody 12F9 (Novus Biologicals).

[0451] In one embodiment, an antigen binding domain against MelanA/MART1 is an antigen binding portion, e.g., CDRs, of an antibody described in, EP2514766 A2; or U.S. Pat. No. 7,749,719.

[0452] In one embodiment, an antigen binding domain against sarcoma translocation breakpoints is an antigen binding portion, e.g., CDRs, of an antibody described in, e.g., Luo et al, EMBO Mol. Med. 4 (6): 453-461 (2012).

[0453] In one embodiment, an antigen binding domain against TRP-2 is an antigen binding portion, e.g., CDRs, of an antibody described in, e.g., Wang et al, J Exp Med. 184 (6): 2207-16 (1996).

[0454] In one embodiment, an antigen binding domain against CYP1B1 is an antigen binding portion, e.g., CDRs, of an antibody described in, e.g., Maecker et al, Blood 102 (9): 3287-3294 (2003).

[0455] In one embodiment, an antigen binding domain against RAGE-1 is an antigen binding portion, e.g., CDRs, of the antibody MAB5328 (EMD Millipore).

[0456] In one embodiment, an antigen binding domain against human telomerase reverse transcriptase is an antigen binding portion, e.g., CDRs, of the antibody cat no: LS-B95-100 (Lifespan Biosciences)

[0457] In one embodiment, an antigen binding domain against intestinal carboxyl esterase is an antigen binding portion, e.g., CDRs, of the antibody 4F12: cat no: LS-B6190-50 (Lifespan Biosciences).

[0458] In one embodiment, an antigen binding domain against mut hsp70-2 is an antigen binding portion, e.g., CDRs, of the antibody Lifespan Biosciences: monoclonal: cat no: LS-C133261-100 (Lifespan Biosciences).

[0459] In one embodiment, an antigen binding domain against CD79a is an antigen binding portion, e.g., CDRs, of the antibody Anti-CD79a antibody [HM47/A9] (ab3121), available from Abcam; antibody CD79A Antibody #3351 available from Cell Signalling Technology; or antibody HPA017748-Anti-CD79A antibody produced in rabbit, available from Sigma Aldrich.

[0460] In one embodiment, an antigen binding domain against CD79b is an antigen binding portion, e.g., CDRs, of the antibody polatuzumab vedotin, anti-CD79b described in Dornan et al., “Therapeutic potential of an anti-CD79b antibody-drug conjugate, anti-CD79b-vc-MMAE, for the treatment of non-Hodgkin lymphoma” Blood. 2009 Sep. 24; 114 (13): 2721-9. doi: 10.1182/blood-2009-02-205500. Epub 2009 Jul. 24, or the bispecific antibody Anti-CD79b/CD3 described in “4507 Pre-Clinical Characterization of T Cell-Dependent Bispecific Antibody Anti-CD79b/CD3 As a Potential Therapy for B Cell Malignancies” Abstracts of 56th ASH Annual Meeting and Exposition, San Francisco, CA December 6-9 2014.

[0461] In one embodiment, an antigen binding domain against CD72 is an antigen binding portion, e.g., CDRs, of the antibody J3-109 described in Myers, and Uckun, “An anti-CD72 immunotoxin against therapy-refractory B-lineage acute lymphoblastic leukemia.” Leuk Lymphoma. 1995 June; 18 (1-2): 119-22, or anti-CD72 (10D6.8.1, mIgG1) described in Polson et al., “Antibody-Drug Conjugates for the Treatment of Non-Hodgkin's Lymphoma: Target and Linker-Drug Selection” Cancer Res Mar. 15, 2009 69; 2358.

[0462] In one embodiment, an antigen binding domain against LAIR1 is an antigen binding portion, e.g., CDRs, of the antibody ANT-301 LAIR1 antibody, available from ProSpec; or anti-human CD305 (LAIR1) Antibody, available from BioLegend.

[0463] In one embodiment, an antigen binding domain against FCAR is an antigen binding portion, e.g., CDRs, of the antibody CD89/FCARAntibody (Catalog #10414-H08H), available from Sino Biological Inc.

[0464] In one embodiment, an antigen binding domain against LILRA2 is an antigen binding portion, e.g., CDRs, of the antibody LILRA2 monoclonal antibody (M17), clone 3C7, available from Abnova, or Mouse Anti-LILRA2 antibody, Monoclonal (2D7), available from Lifespan Biosciences . . .

[0465] In one embodiment, an antigen binding domain against CD300LF is an antigen binding portion, e.g., CDRs, of the antibody Mouse Anti-CMRF35-like molecule 1 antibody, Monoclonal [UP-D2], available from BioLegend, or Rat Anti-CMRF35-like molecule 1 antibody, Monoclonal [234903], available from R&D Systems . . .

[0466] In one embodiment, an antigen binding domain against CLEC12A is an antigen binding portion, e.g., CDRs, of the antibody Bispecific T cell Engager (BiTE) scFv-antibody and ADC described in Noordhuis et al., “Targeting of CLEC12A In Acute Myeloid Leukemia by Antibody-Drug-Conjugates and Bispecific CLL-1xCD3 BiTE Antibody” 53^{rd} ASH Annual Meeting and Exposition, Dec. 10-13, 2011, and MCLA-117 (Merus).

[0467] In one embodiment, an antigen binding domain against BST2 (also called CD317) is an antigen binding portion, e.g., CDRs, of the antibody Mouse Anti-CD317 antibody, Monoclonal [3H4], available from Antibodies-Online or Mouse Anti-CD317 antibody, Monoclonal [696739], available from R&D Systems.

[0468] In one embodiment, an antigen binding domain against EMR2 (also called CD312) is an antigen binding portion, e.g., CDRs, of the antibody Mouse Anti-CD312 antibody, Monoclonal [LS-B8033] available from Lifespan Biosciences, or Mouse Anti-CD312 antibody, Monoclonal [494025] available from R&D Systems.

[0469] In one embodiment, an antigen binding domain against LY75 is an antigen binding portion, e.g., CDRs, of the antibody Mouse Anti-Lymphocyte antigen 75 antibody, Monoclonal [HD30] available from EMD Millipore or Mouse Anti-Lymphocyte antigen 75 antibody, Monoclonal [A15797] available from Life Technologies.

[0470] In one embodiment, an antigen binding domain against GPC3 is an antigen binding portion, e.g., CDRs, of the antibody hGC33 described in Nakano K, Ishiguro T, Konishi H, et al. Generation of a humanized anti-glypican 3 antibody by CDR grafting and stability optimization. Anticancer Drugs. 2010 November; 21 (10): 907-916, or MDX-1414, HN3, or YP7, all three of which are described in Feng et al., “Glypican-3 antibodies: a new therapeutic target for liver cancer.” FEBS Lett. 2014 Jan. 21; 588 (2): 377-82.

[0471] In one embodiment, an antigen binding domain against FCRL5 is an antigen binding portion, e.g., CDRs, of the anti-FcRL5 antibody described in Elkins et al., “FcRL5 as a target of antibody-drug conjugates for the treatment of multiple myeloma” Mol Cancer Ther. 2012 October; 11 (10): 2222-32 . . .

[0472] In one embodiment, an antigen binding domain against IGLL1 is an antigen binding portion, e.g., CDRs, of the antibody Mouse Anti-Immunoglobulin lambda-like polypeptide 1 antibody, Monoclonal [AT1G4] available from Lifespan Biosciences, Mouse Anti-Immunoglobulin lambda-like polypeptide 1 antibody, Monoclonal [HSL11] available from BioLegend.

[0473] In one embodiment, the antigen binding domain comprises one, two three (e.g., all three) heavy chain CDRs, HC CDR1, HC CDR2 and HC CDR3, from an antibody listed above, and/or one, two, three (e.g., all three) light chain CDRs, LC CDR1, LC CDR2 and LC CDR3, from an antibody listed above. In one embodiment, the antigen binding domain comprises a heavy chain variable region and/or a variable light chain region of an antibody listed above.

[0474] In another aspect, the antigen binding domain comprises a humanized antibody or an antibody fragment. In some aspects, a non-human antibody is humanized, where specific sequences or regions of the antibody are modified to increase similarity to an antibody naturally produced in a human or fragment thereof. In one aspect, the antigen binding domain is humanized.

[0475] A humanized antibody can be produced using a variety of techniques known in the art, including but not limited to, CDR-grafting (see, e.g., European Patent No. EP 239,400; International Publication No. WO 91/09967; and U.S. Pat. Nos. 5,225,539, 5,530,101, and 5,585,089, each of which is incorporated herein in its entirety by reference), veneering or resurfacing (see, e.g., European Patent Nos. EP 592,106 and EP 519,596; Padlan, 1991, Molecular Immunology, 28 (4/5): 489-498; Studnicka et al., 1994, Protein Engineering, 7 (6): 805-814; and Roguska et al., 1994, PNAS, 91:969-973, each of which is incorporated herein by its entirety by reference), chain shuffling (see, e.g., U.S. Pat. No. 5,565,332, which is incorporated herein in its entirety by reference), and techniques disclosed in, e.g., U.S. Patent Application Publication No. US2005/0042664, U.S. Patent Application Publication No. US2005/0048617, U.S. Pat. Nos. 6,407,213, 5,766,886, International Publication No. WO 9317105, Tan et al., J. Immunol., 169:1119-25 (2002), Caldas et al., Protein Eng., 13 (5): 353-60 (2000), Morea et al., Methods, 20 (3): 267-79 (2000), Baca et al., J. Biol. Chem., 272 (16): 10678-84 (1997), Roguska et al., Protein Eng., 9 (10): 895-904 (1996), Couto et al., Cancer Res., 55 (23 Supp): 5973s-5977s (1995), Couto et al., Cancer Res., 55 (8): 1717-22 (1995), Sandhu J S, Gene, 150 (2): 409-10 (1994), and Pedersen et al., J. Mol. Biol., 235 (3): 959-73 (1994), each of which is incorporated herein in its entirety by reference. Often, framework residues in the framework regions will be substituted with the corresponding residue from the CDR donor antibody to alter, for example improve, antigen binding. These framework substitutions are identified by methods well-known in the art, e.g., by modeling of the interactions of the CDR and framework residues to identify framework residues important for antigen binding and sequence comparison to identify unusual framework residues at particular positions. (See, e.g., Queen et al., U.S. Pat. No. 5,585,089; and Riechmann et al., 1988, Nature, 332:323, which are incorporated herein by reference in their entireties.)

[0476] A humanized antibody or antibody fragment has one or more amino acid residues remaining in it from a source which is nonhuman. These nonhuman amino acid residues are often referred to as “import” residues, which are typically taken from an “import” variable domain. As provided herein, humanized antibodies or antibody fragments comprise one or more CDRs from nonhuman immunoglobulin molecules and framework regions wherein the amino acid residues comprising the framework are derived completely or mostly from human germline. Multiple techniques for humanization of antibodies or antibody fragments are well-known in the art and can essentially be performed following the method of Winter and co-workers (Jones et al., Nature, 321:522-525 (1986); Riechmann et al., Nature, 332:323-327 (1988); Verhoeyen et al., Science, 239:1534-1536 (1988)), by substituting rodent CDRs or CDR sequences for the corresponding sequences of a human antibody, i.e., CDR-grafting (EP 239,400; PCT Publication No. WO 91/09967; and U.S. Pat. Nos. 4,816,567; 6,331,415; 5,225,539; 5,530,101; 5,585,089; 6,548,640, the contents of which are incorporated herein by reference herein in their entirety). In such humanized antibodies and antibody fragments, substantially less than an intact human variable domain has been substituted by the corresponding sequence from a nonhuman species. Humanized antibodies are often human antibodies in which some CDR residues and possibly some framework (FR) residues are substituted by residues from analogous sites in rodent antibodies. Humanization of antibodies and antibody fragments can also be achieved by veneering or resurfacing (EP 592,106; EP 519,596; Padlan, 1991, Molecular Immunology, 28 (4/5): 489-498; Studnicka et al., Protein Engineering, 7 (6): 805-814 (1994); and Roguska et al., PNAS, 91:969-973 (1994)) or chain shuffling (U.S. Pat. No. 5,565,332), the contents of which are incorporated herein by reference herein in their entirety.

[0477] The choice of human variable domains, both light and heavy, to be used in making the humanized antibodies is to reduce antigenicity. According to the so-called “best-fit” method, the sequence of the variable domain of a rodent antibody is screened against the entire library of known human variable-domain sequences. The human sequence which is closest to that of the rodent is then accepted as the human framework (FR) for the humanized antibody (Sims et al., J. Immunol., 151:2296 (1993); Chothia et al., J. Mol. Biol., 196:901 (1987), the contents of which are incorporated herein by reference herein in their entirety). Another method uses a particular framework derived from the consensus sequence of all human antibodies of a particular subgroup of light or heavy chains. The same framework may be used for several different humanized antibodies (see, e.g., Nicholson et al. Mol. Immun. 34 (16-17): 1157-1165 (1997); Carter et al., Proc. Natl. Acad. Sci. USA, 89:4285 (1992); Presta et al., J. Immunol., 151:2623 (1993), the contents of which are incorporated herein by reference herein in their entirety). In some embodiments, the framework region, e.g., all four framework regions, of the heavy chain variable region are derived from a VH4_4-59 germline sequence. In one embodiment, the framework region can comprise, one, two, three, four or five modifications, e.g., substitutions, e.g., from the amino acid at the corresponding murine sequence. In one embodiment, the framework region, e.g., all four framework regions of the light chain variable region are derived from a VK3_1.25 germline sequence. In one embodiment, the framework region can comprise, one, two, three, four or five modifications, e.g., substitutions, e.g., from the amino acid at the corresponding murine sequence.

[0478] In some aspects, the portion of a CAR composition of the invention that comprises an antibody fragment is humanized with retention of high affinity for the target antigen and other favorable biological properties. According to one aspect of the invention, humanized antibodies and antibody fragments are prepared by a process of analysis of the parental sequences and various conceptual humanized products using three-dimensional models of the parental and humanized sequences. Three-dimensional immunoglobulin models are commonly available and are familiar to those skilled in the art. Computer programs are available which illustrate and display probable three-dimensional conformational structures of selected candidate immunoglobulin sequences. Inspection of these displays permits analysis of the likely role of the residues in the functioning of the candidate immunoglobulin sequence, e.g., the analysis of residues that influence the ability of the candidate immunoglobulin to bind the target antigen. In this way, FR residues can be selected and combined from the recipient and import sequences so that the desired antibody or antibody fragment characteristic, such as increased affinity for the target antigen, is achieved. In general, the CDR residues are directly and most substantially involved in influencing antigen binding.

[0479] A humanized antibody or antibody fragment may retain a similar antigenic specificity as the original antibody, e.g., in the present invention, the ability to bind human a cancer associated antigen as described herein. In some embodiments, a humanized antibody or antibody fragment may have improved affinity and/or specificity of binding to human a cancer associated antigen as described herein.

[0480] In one aspect, the antigen binding domain of the invention is characterized by particular functional features or properties of an antibody or antibody fragment. For example, in one aspect, the portion of a CAR composition of the invention that comprises an antigen binding domain specifically binds a tumor antigen as described herein.

[0481] In one aspect, the anti-cancer associated antigen as described herein binding domain is a fragment, e.g., a single chain variable fragment (scFv). In one aspect, the anti-cancer associated antigen as described herein binding domain is a Fv, a Fab, a (Fab′)₂, or a bi-functional (e.g. bi-specific) hybrid antibody (e.g., Lanzavecchia et al., Eur. J. Immunol. 17, 105 (1987)). In one aspect, the antibodies and fragments thereof of the invention binds a cancer associated antigen as described herein protein with wild-type or enhanced affinity.

[0482] In some instances, scFvs can be prepared according to method known in the art (see, for example, Bird et al., (1988) Science 242:423-426 and Huston et al., (1988) Proc. Natl. Acad. Sci. USA 85:5879-5883). ScFv molecules can be produced by linking VH and VL regions together using flexible polypeptide linkers. The scFv molecules comprise a linker (e.g., a Ser-Gly linker) with an optimized length and/or amino acid composition. The linker length can greatly affect how the variable regions of a scFv fold and interact. In fact, if a short polypeptide linker is employed (e.g., between 5-10 amino acids) intrachain folding is prevented. Interchain folding is also required to bring the two variable regions together to form a functional epitope binding site. For examples of linker orientation and size see, e.g., Hollinger et al. 1993 Proc Natl Acad. Sci. U.S.A. 90:6444-6448, U.S. Patent Application Publication Nos. 2005/0100543, 2005/0175606, 2007/0014794, and PCT publication Nos. WO2006/020258 and WO2007/024715, is incorporated herein by reference.

[0483] An scFv can comprise a linker of at least 1, 2, 3, 4, 5, 6, 7, 8, 9, 10, 11, 12, 13, 14, 15, 16, 17, 18, 19, 20, 25, 30, 35, 40, 45, 50, or more amino acid residues between its VL and VH regions. The linker sequence may comprise any naturally occurring amino acid. In some embodiments, the linker sequence comprises amino acids glycine and serine. In another embodiment, the linker sequence comprises sets of glycine and serine repeats such as (Gly₄Ser)n, where n is a positive integer equal to or greater than 1 (SEQ ID NO:22). In one embodiment, the linker can be (Gly₄Ser)₄ (SEQ ID NO:29) or (Gly₄Ser)₃ (SEQ ID NO: 30). Variation in the linker length may retain or enhance activity, giving rise to superior efficacy in activity studies.

[0484] In another aspect, the antigen binding domain is a T cell receptor (“TCR”), or a fragment thereof, for example, a single chain TCR (scTCR). Methods to make such TCRs are known in the art. See, e.g., Willemsen R A et al, Gene Therapy 7:1369-1377 (2000); Zhang T et al, Cancer Gene Ther 11:487-496 (2004); Aggen et al, Gene Ther. 19 (4): 365-74 (2012) (references are incorporated herein by its entirety). For example, scTCR can be engineered that contains the Vα and Vβ genes from a T cell clone linked by a linker (e.g., a flexible peptide). This approach is very useful to cancer associated target that itself is intracellar, however, a fragment of such antigen (peptide) is presented on the surface of the cancer cells by MHC.

[0485] In one embodiment, an antigen binding domain against EGFRvIII is an antigen binding portion, e.g., CDRs, of a CAR, antibody or antigen-binding fragment thereof described in, e.g., PCT publication WO2014/130657 or US2014/0322275A1. In one embodiment, the CAR molecule comprises an EGFRvIII CAR, or an antigen binding domain according to Table 2 or SEQ ID NO:11 of WO 2014/130657, incorporated herein by reference, or a sequence substantially identical thereto (e.g., at least 85%, 90%, 95% or more identical thereto). The amino acid and nucleotide sequences encoding the EGFRvIII CAR molecules and antigen binding domains (e.g., including one, two, three VH CDRs; and one, two, three VL CDRs according to Kabat or Chothia), are specified in WO 2014/130657.

[0486] In one embodiment, an antigen binding domain against mesothelin is an antigen binding portion, e.g., CDRs, of an antibody, antigen-binding fragment or CAR described in, e.g., PCT publication WO2015/090230. In one embodiment, an antigen binding domain against mesothelin is an antigen binding portion, e.g., CDRs, of an antibody, antigen-binding fragment, or CAR described in, e.g., PCT publication WO1997/025068, WO1999/028471, WO2005/014652, WO2006/099141, WO2009/045957, WO2009/068204, WO2013/142034, WO2013/040557, or WO2013/063419.

[0487] In an embodiment, the CAR molecule comprises a mesothelin CAR described herein, e.g., a mesothelin CAR described in WO 2015/090230, incorporated herein by reference. In embodiments, the mesothelin CAR comprises an amino acid, or has a nucleotide sequence shown in WO 2015/090230 incorporated herein by reference, or a sequence substantially identical to any of the aforesaid sequences (e.g., at least 85%, 90%, 95% or more identical to any of the aforesaid mesothelin CAR sequences). In one embodiment, the CAR molecule comprises a mesothelin CAR, or an antigen binding domain according to Tables 2-3 of WO 2015/090230, incorporated herein by reference, or a sequence substantially identical thereto (e.g., at least 85%, 90%, 95% or more identical thereto). The amino acid and nucleotide sequences encoding the mesothelin CAR molecules and antigen binding domains (e.g., including one, two, three VH CDRs; and one, two, three VL CDRs according to Kabat or Chothia), are specified in WO 2015/090230.

[0488] In one embodiment, an antigen binding domain against CD123 is an antigen binding portion, e.g., CDRs, of an antibody, antigen-binding fragment or CAR described in, e.g., PCT publication WO2016/028896. In one embodiment, an antigen binding domain against CD123 is an antigen binding portion, e.g., CDRs, of an antibody, antigen-binding fragment or CAR described in, e.g., PCT publication WO2014/130635. In one embodiment, an antigen binding domain against CD123 is an antigen binding portion, e.g., CDRs, of an antibody, antigen-binding fragment, or CAR described in, e.g., PCT publication WO2014/138805, WO2014/138819, WO2013/173820, WO2014/144622, WO2001/66139, WO2010/126066, WO2014/144622, or US2009/0252742.

[0489] In one embodiment, an antigen binding domain against CD123 is an antigen binding portion, e.g., CDRs, of an antibody, antigen-binding fragment or CAR described in, e.g., US2014/0322212A1 or US2016/0068601A1, both incorporated herein by reference. In embodiments, the CD123 CAR comprises an amino acid, or has a nucleotide sequence shown in US2014/0322212A1 or US2016/0068601A1, both incorporated herein by reference, or a sequence substantially identical to any of the aforesaid sequences (e.g., at least 85%, 90%, 95% or more identical to any of the aforesaid CD123 CAR sequences). In one embodiment, the CAR molecule comprises a CD123 CAR (e.g., any of the CAR1-CAR8), or an antigen binding domain according to Tables 1-2 of WO 2014/130635, incorporated herein by reference, or a sequence substantially identical thereto (e.g., at least 85%, 90%, 95% or more identical to any of the aforesaid CD123 CAR sequences). The amino acid and nucleotide sequences encoding the CD123 CAR molecules and antigen binding domains (e.g., including one, two, three VH CDRs; and one, two, three VL CDRs according to Kabat or Chothia), are specified in WO 2014/130635.

[0490] In other embodiments, the CAR molecule comprises a CD123 CAR comprises a CAR molecule (e.g., any of the CAR123-1 to CAR123-4 and hzCAR123-1 to hzCAR123-32), or an antigen binding domain according to Tables 2, 6, and 9 of WO2016/028896, incorporated herein by reference, or a sequence substantially identical thereto (e.g., at least 85%, 90%, 95% or more identical to any of the aforesaid CD123 CAR sequences). The amino acid and nucleotide sequences encoding the CD123 CAR molecules and antigen binding domains (e.g., including one, two, three VH CDRs; and one, two, three VL CDRs according to Kabat or Chothia), are specified in WO2016/028896.

[0491] In one embodiment, an antigen binding domain against CD22 is an antigen binding portion, e.g., CDRs, of an antibody described in, e.g., Haso et al., Blood, 121 (7): 1165-1174 (2013); Wayne et al., Clin Cancer Res 16 (6): 1894-1903 (2010); Kato et al., Leuk Res 37 (1): 83-88 (2013); Creative BioMart (creativebiomart.net): MOM-18047-S(P).

[0492] In one embodiment, an antigen binding domain against CS-1 is an antigen binding portion, e.g., CDRs, of Elotuzumab (BMS), see e.g., Tai et al., 2008, Blood 112 (4): 1329-37; Tai et al., 2007, Blood. 110 (5): 1656-63.

[0493] In one embodiment, an antigen binding domain against CLL-1 is an antigen binding portion, e.g., CDRs, of an antibody available from R&D, ebiosciences, Abcam, for example, PE-CLL1-hu Cat #353604 (BioLegend); and PE-CLL1 (CLEC12A) Cat #562566 (BD).

[0494] In other embodiments, the CLL1 CAR includes a CAR molecule, or an antigen binding domain according to Table 2 of WO2016/014535, incorporated herein by reference. The amino acid and nucleotide sequences encoding the CLL-1 CAR molecules and antigen binding domains (e.g., including one, two, three VH CDRs; and one, two, three VL CDRs according to Kabat or Chothia), are specified in WO2016/014535.

[0495] In one embodiment, an antigen binding domain against CD33 is an antigen binding portion, e.g., CDRs, of an antibody described in, e.g., Bross et al., Clin Cancer Res 7 (6): 1490-1496 (2001) (Gemtuzumab Ozogamicin, hP67.6), Caron et al., Cancer Res 52 (24): 6761-6767 (1992) (Lintuzumab, HuM195), Lapusan et al., Invest New Drugs 30 (3): 1121-1131 (2012) (AVE9633), Aigner et al., Leukemia 27 (5): 1107-1115 (2013) (AMG330, CD33 BiTE), Dutour et al., Adv hematol 2012:683065 (2012), and Pizzitola et al., Leukemia doi: 10.1038/Lue.2014.62 (2014).

[0496] In one embodiment, an antigen binding domain against CD33 is an antigen binding portion, e.g., CDRs, of an antibody described in, US2016/0096892A1, incorporated herein by reference. In embodiments, the CD33 CAR comprises an amino acid, or has a nucleotide sequence shown in US2016/0096892A1, incorporated herein by reference, or a sequence substantially identical to any of the aforesaid sequences (e.g., at least 85%, 90%, 95% or more identical to any of the aforesaid CD33 CAR sequences). In other embodiments, the CD33 CAR CAR or antigen binding domain thereof can include a CAR molecule (e.g., any of CAR33-1 to CAR-33-9), or an antigen binding domain according to Table 2 or 9 of WO2016/014576, incorporated herein by reference, or a sequence substantially identical to any of the aforesaid sequences (e.g., at least 85%, 90%, 95% or more identical to any of the aforesaid CD33 CAR sequences). The amino acid and nucleotide sequences encoding the CD33 CAR molecules and antigen binding domains (e.g., including one, two, three VH CDRs; and one, two, three VL CDRs according to Kabat or Chothia), are specified in WO2016/014576.

[0497] In one embodiment, an antigen binding domain against GD2 is an antigen binding portion, e.g., CDRs, of an antibody described in, e.g., Mujoo et al., Cancer Res. 47 (4): 1098-1104 (1987); Cheung et al., Cancer Res 45 (6): 2642-2649 (1985), Cheung et al., J Clin Oncol 5 (9): 1430-1440 (1987), Cheung et al., J Clin Oncol 16 (9): 3053-3060 (1998), Handgretinger et al., Cancer Immunol Immunother 35 (3): 199-204 (1992). In some embodiments, an antigen binding domain against GD2 is an antigen binding portion of an antibody selected from mAb 14.18, 14G2a, ch14.18, hu14.18, 3F8, hu3F8, 3G6, 8B6, 60C3, 10B8, ME36.1, and 8H9, see e.g., WO2012033885, WO2013040371, WO2013192294, WO2013061273, WO2013123061, WO2013074916, and WO201385552. In some embodiments, an antigen binding domain against GD2 is an antigen binding portion of an antibody described in US Publication No.: 20100150910 or PCT Publication No.: WO 2011160119.

[0498] In one embodiment, an antigen binding domain against BCMA is an antigen binding portion, e.g., CDRs, of an antibody, antigen-binding fragment or CAR described in, e.g., PCT publication WO2016/014565, e.g., the antigen binding portion of CAR BCMA-10 as described in WO2016/014565. In one embodiment, an antigen binding domain against BCMA is an antigen binding portion, e.g., CDRs, of an antibody, antigen-binding fragment or CAR described in, e.g., PCT publication WO2016/014789. In one embodiment, an antigen binding domain against BCMA is an antigen binding portion, e.g., CDRs, of an antibody described in, e.g., WO2012/163805, WO2001/12812, and WO2003/062401.

[0499] In other embodiment, the CAR molecule comprises a BCMA CAR molecule, or an antigen binding domain against BCMA described herein, e.g., a BCMA CAR described in US-2016-0046724-A1 or WO2016/014565. In embodiments, the BCMA CAR comprises an amino acid, or has a nucleotide sequence of a CAR molecule, or an antigen binding domain according to US-2016-0046724-A1, or Table 1 or 16, SEQ ID NO: 271 or SEQ ID NO: 273 of WO2016/014565, incorporated herein by reference, or a sequence substantially identical to any of the aforesaid sequences (e.g., at least 85%, 90%, 95% or more identical to any of the aforesaid BCMA CAR sequences). The amino acid and nucleotide sequences encoding the BCMA CAR molecules and antigen binding domains (e.g., including one, two, three VH CDRs; and one, two, three VL CDRs according to Kabat or Chothia), are specified in WO2016/014565.

[0500] In one embodiment, an antigen binding domain against GFR ALPHA-4 CAR antigen is an antigen binding portion, e.g., CDRs, of an antibody described in, e.g., WO2016/025880, incorporated herein by reference. In one embodiment, the CAR molecule comprises an a GFR ALPHA-4 CAR, e.g., a CAR molecule, or an antigen binding domain according to Table 2 of WO2016/025880, incorporated herein by reference, or a sequence substantially identical to any of the aforesaid sequences (e.g., at least 85%, 90%, 95% or more identical to any of the aforesaid GFR ALPHA-4 sequences). The amino acid and nucleotide sequences encoding the GFR ALPHA-4 CAR molecules and antigen binding domains (e.g., including one, two, three VH CDRs; and one, two, three VL CDRs according to Kabat or Chothia), are specified in WO2016/025880.

[0501] In one embodiment, an antigen binding domain against Tn antigen is an antigen binding portion, e.g., CDRs, of an antibody described in, e.g., U.S. Pat. No. 8,440,798; Brooks et al., PNAS 107 (22): 10056-10061 (2010), and Stone et al., OncoImmunology 1 (6): 863-873 (2012).

[0502] In one embodiment, an antigen binding domain against PSMA is an antigen binding portion, e.g., CDRs, of an antibody described in, e.g., Parker et al., Protein Expr Purif 89 (2): 136-145 (2013), US20110268656 (J591 ScFv); Frigerio et al, European J Cancer 49 (9): 2223-2232 (2013) (scFvD2B); WO 2006125481 (mAbs 3/A12, 3/E7 and 3/F11) and single chain antibody fragments (scFv A5 and D7).

[0503] In one embodiment, an antigen binding domain against ROR1 is an antigen binding portion, e.g., CDRs, of an antibody described in, e.g., Hudecek et al., Clin Cancer Res 19 (12): 3153-3164 (2013); WO 2011159847; and US20130101607.

[0504] In one embodiment, an antigen binding domain against FLT3 is an antigen binding portion, e.g., CDRs, of an antibody described in, e.g., WO2011076922, U.S. Pat. No. 5,777,084, EP0754230, US20090297529, and several commercial catalog antibodies (R&D, ebiosciences, Abcam).

[0505] In one embodiment, an antigen binding domain against TAG72 is an antigen binding portion, e.g., CDRs, of an antibody described in, e.g., Hombach et al., Gastroenterology 113 (4): 1163-1170 (1997); and Abcam ab691.

[0506] In one embodiment, an antigen binding domain against FAP is an antigen binding portion, e.g., CDRs, of an antibody described in, e.g., Ostermann et al., Clinical Cancer Research 14:4584-4592 (2008) (FAP5), US Pat. Publication No. 2009/0304718; sibrotuzumab (see e.g., Hofheinz et al., Oncology Research and Treatment 26 (1), 2003); and Tran et al., J Exp Med 210 (6): 1125-1135 (2013).

[0507] In one embodiment, an antigen binding domain against CD38 is an antigen binding portion, e.g., CDRs, of daratumumab (see, e.g., Groen et al., Blood 116 (21): 1261-1262 (2010); MOR202 (see, e.g., U.S. Pat. No. 8,263,746); or antibodies described in U.S. Pat. No. 8,362,211.

[0508] In one embodiment, an antigen binding domain against CD44v6 is an antigen binding portion, e.g., CDRs, of an antibody described in, e.g., Casucci et al., Blood 122 (20): 3461-3472 (2013).

[0509] In one embodiment, an antigen binding domain against CEA is an antigen binding portion, e.g., CDRs, of an antibody described in, e.g., Chmielewski et al., Gastoenterology 143 (4): 1095-1107 (2012).

[0510] In one embodiment, an antigen binding domain against EPCAM is an antigen binding portion, e.g., CDRS, of an antibody selected from MT110, EpCAM-CD3 bispecific Ab (see, e.g., clinicaltrials.gov/ct2/show/NCT00635596); Edrecolomab; 3622W94; ING-1; and adecatumumab (MT201).

[0511] In one embodiment, an antigen binding domain against PRSS21 is an antigen binding portion, e.g., CDRs, of an antibody described in U.S. Pat. No. 8,080,650.

[0512] In one embodiment, an antigen binding domain against B7H3 is an antigen binding portion, e.g., CDRs, of an antibody MGA271 (Macrogenics).

[0513] In one embodiment, an antigen binding domain against KIT is an antigen binding portion, e.g., CDRs, of an antibody described in, e.g., U.S. Pat. No. 7,915,391, US20120288506, and several commercial catalog antibodies.

[0514] In one embodiment, an antigen binding domain against IL-13Ra2 is an antigen binding portion, e.g., CDRs, of an antibody described in, e.g., WO2008/146911, WO2004087758, several commercial catalog antibodies, and WO2004087758.

[0515] In one embodiment, an antigen binding domain against CD30 is an antigen binding portion, e.g., CDRs, of an antibody described in, e.g., U.S. Pat. No. 7,090,843 B1, and EP0805871.

[0516] In one embodiment, an antigen binding domain against GD3 is an antigen binding portion, e.g., CDRs, of an antibody described in, e.g., U.S. Pat. Nos. 7,253,263; 8,207,308; 20,120,276046; EP1013761; WO2005035577; and U.S. Pat. No. 6,437,098.

[0517] In one embodiment, an antigen binding domain against CD171 is an antigen binding portion, e.g., CDRs, of an antibody described in, e.g., Hong et al., J Immunother 37 (2): 93-104 (2014).

[0518] In one embodiment, an antigen binding domain against IL-11Ra is an antigen binding portion, e.g., CDRs, of an antibody available from Abcam (cat #ab55262) or Novus Biologicals (cat #EPR5446). In another embodiment, an antigen binding domain again IL-11Ra is a peptide, see, e.g., Huang et al., Cancer Res 72 (1): 271-281 (2012).

[0519] In one embodiment, an antigen binding domain against PSCA is an antigen binding portion, e.g., CDRs, of an antibody described in, e.g., Morgenroth et al., Prostate 67 (10): 1121-1131 (2007) (scFv 7F5); Nejatollahi et al., J of Oncology 2013 (2013), article ID 839831 (scFv C5-II); and US Pat Publication No. 20090311181.

[0520] In one embodiment, an antigen binding domain against VEGFR2 is an antigen binding portion, e.g., CDRs, of an antibody described in, e.g., Chinnasamy et al., J Clin Invest 120 (11): 3953-3968 (2010).

[0521] In one embodiment, an antigen binding domain against LewisY is an antigen binding portion, e.g., CDRs, of an antibody described in, e.g., Kelly et al., Cancer Biother Radiopharm 23 (4): 411-423 (2008) (hu3S193 Ab (scFvs)); Dolezal et al., Protein Engineering 16 (1): 47-56 (2003) (NC10 scFv).

[0522] In one embodiment, an antigen binding domain against CD24 is an antigen binding portion, e.g., CDRs, of an antibody described in, e.g., Maliar et al., Gastroenterology 143 (5): 1375-1384 (2012).

[0523] In one embodiment, an antigen binding domain against PDGFR-beta is an antigen binding portion, e.g., CDRs, of an antibody Abcam ab32570.

[0524] In one embodiment, an antigen binding domain against SSEA-4 is an antigen binding portion, e.g., CDRs, of antibody MC813 (Cell Signaling), or other commercially available antibodies.

[0525] In one embodiment, an antigen binding domain against CD20 is an antigen binding portion, e.g., CDRs, of the antibody Rituximab, Ofatumumab, Ocrelizumab, Veltuzumab, or GA101.

[0526] In one embodiment, an antigen binding domain against Folate receptor alpha is an antigen binding portion, e.g., CDRs, of the antibody IMGN853, or an antibody described in US20120009181; U.S. Pat. No. 4,851,332, LK26: U.S. Pat. No. 5,952,484.

[0527] In one embodiment, an antigen binding domain against ERBB2 (Her2/neu) is an antigen binding portion, e.g., CDRs, of the antibody trastuzumab, or pertuzumab.

[0528] In one embodiment, an antigen binding domain against MUC1 is an antigen binding portion, e.g., CDRs, of the antibody SAR566658.

[0529] In one embodiment, the antigen binding domain against EGFR is antigen binding portion, e.g., CDRs, of the antibody cetuximab, panitumumab, zalutumumab, nimotuzumab, or matuzumab.

[0530] In one embodiment, an antigen binding domain against NCAM is an antigen binding portion, e.g., CDRs, of the antibody clone 2-2B: MAB5324 (EMD Millipore).

[0531] In one embodiment, an antigen binding domain against Ephrin B2 is an antigen binding portion, e.g., CDRs, of an antibody described in, e.g., Abengozar et al., Blood 119 (19): 4565-4576 (2012).

[0532] In one embodiment, an antigen binding domain against IGF-I receptor is an antigen binding portion, e.g., CDRs, of an antibody described in, e.g., U.S. Pat. No. 8,344,112 B2; EP2322550 A1; WO 2006/138315, or PCT/US2006/022995.

[0533] In one embodiment, an antigen binding domain against CAIX is an antigen binding portion, e.g., CDRs, of the antibody clone 303123 (R&D Systems).

[0534] In one embodiment, an antigen binding domain against LMP2 is an antigen binding portion, e.g., CDRs, of an antibody described in, e.g., U.S. Pat. No. 7,410,640, or US20050129701.

[0535] In one embodiment, an antigen binding domain against gp100 is an antigen binding portion, e.g., CDRs, of the antibody HMB45, NKIbetaB, or an antibody described in WO2013165940, or US20130295007

[0536] In one embodiment, an antigen binding domain against tyrosinase is an antigen binding portion, e.g., CDRs, of an antibody described in, e.g., US5843674; or US19950504048.

[0537] In one embodiment, an antigen binding domain against EphA2 is an antigen binding portion, e.g., CDRs, of an antibody described in, e.g., Yu et al., Mol Ther 22 (1): 102-111 (2014).

[0538] In one embodiment, an antigen binding domain against GD3 is an antigen binding portion, e.g., CDRs, of an antibody described in, e.g., U.S. Pat. Nos. 7,253,263; 8,207,308; 20,120,276046; EP1013761 A3; 20120276046; WO2005035577; or U.S. Pat. No. 6,437,098.

[0539] In one embodiment, an antigen binding domain against fucosyl GM1 is an antigen binding portion, e.g., CDRs, of an antibody described in, e.g., US20100297138; or WO2007/067992.

[0540] In one embodiment, an antigen binding domain against sLe is an antigen binding portion, e.g., CDRs, of the antibody G193 (for lewis Y), see Scott AM et al, Cancer Res 60:3254-61 (2000), also as described in Neeson et al, J Immunol May 2013 190 (Meeting Abstract Supplement) 177.10.

[0541] In one embodiment, an antigen binding domain against GM3 is an antigen binding portion, e.g., CDRs, of the antibody CA 2523449 (mAb 14F7).

[0542] In one embodiment, an antigen binding domain against HMWMAA is an antigen binding portion, e.g., CDRs, of an antibody described in, e.g., Kmiecik et al., Oncoimmunology 3 (1): e27185 (2014) (PMID: 24575382) (mAb9.2.27); U.S. Pat. No. 6,528,481; WO2010033866; or US20140004124.

[0543] In one embodiment, an antigen binding domain against o-acetyl-GD2 is an antigen binding portion, e.g., CDRs, of the antibody 8B6.

[0544] In one embodiment, an antigen binding domain against TEM1/CD248 is an antigen binding portion, e.g., CDRs, of an antibody described in, e.g., Marty et al., Cancer Lett 235 (2): 298-308 (2006); Zhao et al., J Immunol Methods 363 (2): 221-232 (2011).

[0545] In one embodiment, an antigen binding domain against CLDN6 is an antigen binding portion, e.g., CDRs, of the antibody IMAB027 (Ganymed Pharmaceuticals), see e.g., clinicaltrial.gov/show/NCT02054351.

[0546] In one embodiment, an antigen binding domain against TSHR is an antigen binding portion, e.g., CDRs, of an antibody described in, e.g., U.S. Pat. Nos. 8,603,466; 8,501,415; or U.S. Pat. No. 8,309,693.

[0547] In one embodiment, an antigen binding domain against GPRC5D is an antigen binding portion, e.g., CDRs, of the antibody FAB6300A (R&D Systems); or LS-A4180 (Lifespan Biosciences).

[0548] In one embodiment, an antigen binding domain against CD97 is an antigen binding portion, e.g., CDRs, of an antibody described in, e.g., U.S. Pat. No. 6,846,911; de Groot et al., J Immunol 183 (6): 4127-4134 (2009); or an antibody from R&D: MAB3734.

[0549] In one embodiment, an antigen binding domain against ALK is an antigen binding portion, e.g., CDRs, of an antibody described in, e.g., Mino-Kenudson et al., Clin Cancer Res 16 (5): 1561-1571 (2010).

[0550] In one embodiment, an antigen binding domain against polysialic acid is an antigen binding portion, e.g., CDRs, of an antibody described in, e.g., Nagae et al., J Biol Chem 288 (47): 33784-33796 (2013).

[0551] In one embodiment, an antigen binding domain against PLAC1 is an antigen binding portion, e.g., CDRs, of an antibody described in, e.g., Ghods et al., Biotechnol Appl Biochem 2013 doi: 10.1002/bab.1177.

[0552] In one embodiment, an antigen binding domain against GloboH is an antigen binding portion of the antibody VK9; or an antibody described in, e.g., Kudryashov V et al, Glycoconj J.15 (3): 243-9 (1998), Lou et al., Proc Natl Acad Sci USA 111 (7): 2482-2487 (2014); MBr1: Bremer E-G et al. J Biol Chem 259:14773-14777 (1984).

[0553] In one embodiment, an antigen binding domain against NY-BR-1 is an antigen binding portion, e.g., CDRs of an antibody described in, e.g., Jager et al., Appl Immunohistochem Mol Morphol 15 (1): 77-83 (2007).

[0554] In one embodiment, an antigen binding domain against WT-1 is an antigen binding portion, e.g., CDRs, of an antibody described in, e.g., Dao et al., Sci Transl Med 5 (176): 176ra33 (2013); or WO2012/135854.

[0555] In one embodiment, an antigen binding domain against MAGE-A1 is an antigen binding portion, e.g., CDRs, of an antibody described in, e.g., Willemsen et al., J Immunol 174 (12): 7853-7858 (2005) (TCR-like scFv).

[0556] In one embodiment, an antigen binding domain against sperm protein 17 is an antigen binding portion, e.g., CDRs, of an antibody described in, e.g., Song et al., Target Oncol 2013 Aug. 14 (PMID: 23943313); Song et al., Med Oncol 29 (4): 2923-2931 (2012).

[0557] In one embodiment, an antigen binding domain against Tie 2 is an antigen binding portion, e.g., CDRs, of the antibody AB33 (Cell Signaling Technology).

[0558] In one embodiment, an antigen binding domain against MAD-CT-2 is an antigen binding portion, e.g., CDRs, of an antibody described in, e.g., PMID: 2450952; U.S. Pat. No. 7,635,753.

[0559] In one embodiment, an antigen binding domain against Fos-related antigen 1 is an antigen binding portion, e.g., CDRs, of the antibody 12F9 (Novus Biologicals).

[0560] In one embodiment, an antigen binding domain against MelanA/MART1 is an antigen binding portion, e.g., CDRs, of an antibody described in, EP2514766 A2; or U.S. Pat. No. 7,749,719.

[0561] In one embodiment, an antigen binding domain against sarcoma translocation breakpoints is an antigen binding portion, e.g., CDRs, of an antibody described in, e.g., Luo et al, EMBO Mol. Med. 4 (6): 453-461 (2012).

[0562] In one embodiment, an antigen binding domain against TRP-2 is an antigen binding portion, e.g., CDRs, of an antibody described in, e.g., Wang et al, J Exp Med. 184 (6): 2207-16 (1996).

[0563] In one embodiment, an antigen binding domain against CYP1B1 is an antigen binding portion, e.g., CDRs, of an antibody described in, e.g., Maecker et al, Blood 102 (9): 3287-3294 (2003).

[0564] In one embodiment, an antigen binding domain against RAGE-1 is an antigen binding portion, e.g., CDRs, of the antibody MAB5328 (EMD Millipore).

[0565] In one embodiment, an antigen binding domain against human telomerase reverse transcriptase is an antigen binding portion, e.g., CDRs, of the antibody cat no: LS-B95-100 (Lifespan Biosciences)

[0566] In one embodiment, an antigen binding domain against intestinal carboxyl esterase is an antigen binding portion, e.g., CDRs, of the antibody 4F12: cat no: LS-B6190-50 (Lifespan Biosciences).

[0567] In one embodiment, an antigen binding domain against mut hsp70-2 is an antigen binding portion, e.g., CDRs, of the antibody Lifespan Biosciences: monoclonal: cat no: LS-C133261-100 (Lifespan Biosciences).

[0568] In one embodiment, an antigen binding domain against CD79a is an antigen binding portion, e.g., CDRs, of the antibody Anti-CD79a antibody [HM47/A9] (ab3121), available from Abcam; antibody CD79A Antibody #3351 available from Cell Signalling Technology; or antibody HPA017748-Anti-CD79A antibody produced in rabbit, available from Sigma Aldrich.

[0569] In one embodiment, an antigen binding domain against CD79b is an antigen binding portion, e.g., CDRs, of the antibody polatuzumab vedotin, anti-CD79b described in Dornan et al., “Therapeutic potential of an anti-CD79b antibody-drug conjugate, anti-CD79b-vc-MMAE, for the treatment of non-Hodgkin lymphoma” Blood. 2009 Sep. 24; 114 (13): 2721-9. doi: 10.1182/blood-2009-02-205500. Epub 2009 Jul. 24, or the bispecific antibody Anti-CD79b/CD3 described in “4507 Pre-Clinical Characterization of T Cell-Dependent Bispecific Antibody Anti-CD79b/CD3 As a Potential Therapy for B Cell Malignancies” Abstracts of 56th ASH Annual Meeting and Exposition, San Francisco, CA December 6-9 2014.

[0570] In one embodiment, an antigen binding domain against CD72 is an antigen binding portion, e.g., CDRs, of the antibody J3-109 described in Myers, and Uckun, “An anti-CD72 immunotoxin against therapy-refractory B-lineage acute lymphoblastic leukemia.” Leuk Lymphoma. 1995 June; 18 (1-2): 119-22, or anti-CD72 (10D6.8.1, mlgG1) described in Polson et al., “Antibody-Drug Conjugates for the Treatment of Non-Hodgkin's Lymphoma: Target and Linker-Drug Selection” Cancer Res Mar. 15, 2009 69; 2358.

[0571] In one embodiment, an antigen binding domain against LAIR1 is an antigen binding portion, e.g., CDRs, of the antibody ANT-301 LAIR1 antibody, available from ProSpec; or anti-human CD305 (LAIR1) Antibody, available from BioLegend.

[0572] In one embodiment, an antigen binding domain against FCAR is an antigen binding portion, e.g., CDRs, of the antibody CD89/FCARAntibody (Catalog #10414-H08H), available from Sino Biological Inc.

[0573] In one embodiment, an antigen binding domain against LILRA2 is an antigen binding portion, e.g., CDRs, of the antibody LILRA2 monoclonal antibody (M17), clone 3C7, available from Abnova, or Mouse Anti-LILRA2 antibody, Monoclonal (2D7), available from Lifespan Biosciences . . .

[0574] In one embodiment, an antigen binding domain against CD300LF is an antigen binding portion, e.g., CDRs, of the antibody Mouse Anti-CMRF35-like molecule 1 antibody, Monoclonal [UP-D2], available from BioLegend, or Rat Anti-CMRF35-like molecule 1 antibody, Monoclonal [234903], available from R&D Systems . . .

[0575] In one embodiment, an antigen binding domain against CLEC12A is an antigen binding portion, e.g., CDRs, of the antibody Bispecific T cell Engager (BiTE) scFv-antibody and ADC described in Noordhuis et al., “Targeting of CLEC12A In Acute Myeloid Leukemia by Antibody-Drug-Conjugates and Bispecific CLL-1xCD3 BiTE Antibody” 53rd ASH Annual Meeting and Exposition, Dec. 10-13, 2011, and MCLA-117 (Merus).

[0576] In one embodiment, an antigen binding domain against BST2 (also called CD317) is an antigen binding portion, e.g., CDRs, of the antibody Mouse Anti-CD317 antibody, Monoclonal [3H4], available from Antibodies-Online or Mouse Anti-CD317 antibody, Monoclonal [696739], available from R&D Systems.

[0577] In one embodiment, an antigen binding domain against EMR2 (also called CD312) is an antigen binding portion, e.g., CDRs, of the antibody Mouse Anti-CD312 antibody, Monoclonal [LS-B8033] available from Lifespan Biosciences, or Mouse Anti-CD312 antibody, Monoclonal [494025] available from R&D Systems.

[0578] In one embodiment, an antigen binding domain against LY75 is an antigen binding portion, e.g., CDRs, of the antibody Mouse Anti-Lymphocyte antigen 75 antibody, Monoclonal [HD30] available from EMD Millipore or Mouse Anti-Lymphocyte antigen 75 antibody, Monoclonal [A15797] available from Life Technologies.

[0579] In one embodiment, an antigen binding domain against GPC3 is an antigen binding portion, e.g., CDRs, of the antibody hGC33 described in Nakano K, Ishiguro T, Konishi H, et al. Generation of a humanized anti-glypican 3 antibody by CDR grafting and stability optimization. Anticancer Drugs. 2010 November; 21 (10): 907-916, or MDX-1414, HN3, or YP7, all three of which are described in Feng et al., “Glypican-3 antibodies: a new therapeutic target for liver cancer.” FEBS Lett. 2014 Jan. 21; 588 (2): 377-82.

[0580] In one embodiment, an antigen binding domain against FCRL5 is an antigen binding portion, e.g., CDRs, of the anti-FcRL5 antibody described in Elkins et al., “FcRL5 as a target of antibody-drug conjugates for the treatment of multiple myeloma” Mol Cancer Ther. 2012 October; 11 (10): 2222-32.

[0581] In one embodiment, an antigen binding domain against IGLL1 is an antigen binding portion, e.g., CDRs, of the antibody Mouse Anti-Immunoglobulin lambda-like polypeptide 1 antibody, Monoclonal [AT1G4] available from Lifespan Biosciences, Mouse Anti-Immunoglobulin lambda-like polypeptide 1 antibody, Monoclonal [HSL11] available from BioLegend.

[0582] In one embodiment, the antigen binding domain comprises one, two three (e.g., all three) heavy chain CDRs, HC CDR1, HC CDR2 and HC CDR3, from an antibody listed above, and/or one, two, three (e.g., all three) light chain CDRs, LC CDR1, LC CDR2 and LC CDR3, from an antibody listed above. In one embodiment, the antigen binding domain comprises a heavy chain variable region and/or a variable light chain region of an antibody listed above.

[0583] In another aspect, the antigen binding domain comprises a humanized antibody or an antibody fragment. In some aspects, a non-human antibody is humanized, where specific sequences or regions of the antibody are modified to increase similarity to an antibody naturally produced in a human or fragment thereof. In one aspect, the antigen binding domain is humanized.

### Bispecific CARs

[0584] In an embodiment a multispecific antibody molecule is a bispecific antibody molecule. A bispecific antibody has specificity for no more than two antigens. A bispecific antibody molecule is characterized by a first immunoglobulin variable domain sequence which has binding specificity for a first epitope and a second immunoglobulin variable domain sequence that has binding specificity for a second epitope. In an embodiment the first and second epitopes are on the same antigen, e.g., the same protein (or subunit of a multimeric protein). In an embodiment the first and second epitopes overlap. In an embodiment the first and second epitopes do not overlap. In an embodiment the first and second epitopes are on different antigens, e.g., different proteins (or different subunits of a multimeric protein). In an embodiment a bispecific antibody molecule comprises a heavy chain variable domain sequence and a light chain variable domain sequence which have binding specificity for a first epitope and a heavy chain variable domain sequence and a light chain variable domain sequence which have binding specificity for a second epitope. In an embodiment a bispecific antibody molecule comprises a half antibody having binding specificity for a first epitope and a half antibody having binding specificity for a second epitope. In an embodiment a bispecific antibody molecule comprises a half antibody, or fragment thereof, having binding specificity for a first epitope and a half antibody, or fragment thereof, having binding specificity for a second epitope. In an embodiment a bispecific antibody molecule comprises a scFv, or fragment thereof, have binding specificity for a first epitope and a scFv, or fragment thereof, have binding specificity for a second epitope.

[0585] In certain embodiments, the antibody molecule is a multi-specific (e.g., a bispecific or a trispecific) antibody molecule. Protocols for generating bispecific or heterodimeric antibody molecules are known in the art; including but not limited to, for example, the “knob in a hole” approach described in, e.g., U.S. Pat. No. 5,731,168; the electrostatic steering Fc pairing as described in, e.g., WO 09/089004, WO 06/106905 and WO 2010/129304; Strand Exchange Engineered Domains (SEED) heterodimer formation as described in, e.g., WO 07/110205; Fab arm exchange as described in, e.g., WO 08/119353, WO 2011/131746, and WO 2013/060867; double antibody conjugate, e.g., by antibody cross-linking to generate a bi-specific structure using a heterobifunctional reagent having an amine-reactive group and a sulfhydryl reactive group as described in, e.g., U.S. Pat. No. 4,433,059; bispecific antibody determinants generated by recombining half antibodies (heavy-light chain pairs or Fabs) from different antibodies through cycle of reduction and oxidation of disulfide bonds between the two heavy chains, as described in, e.g., U.S. Pat. No. 4,444,878; trifunctional antibodies, e.g., three Fab′ fragments cross-linked through sulfhdryl reactive groups, as described in, e.g., U.S. Pat. No. 5,273,743; biosynthetic binding proteins, e.g., pair of scFvs cross-linked through C-terminal tails preferably through disulfide or amine-reactive chemical cross-linking, as described in, e.g., U.S. Pat. No. 5,534,254; bifunctional antibodies, e.g., Fab fragments with different binding specificities dimerized through leucine zippers (e.g., c-fos and c-jun) that have replaced the constant domain, as described in, e.g., U.S. Pat. No. 5,582,996; bispecific and oligospecific mono- and oligovalent receptors, e.g., VH-CH1 regions of two antibodies (two Fab fragments) linked through a polypeptide spacer between the CH1 region of one antibody and the VH region of the other antibody typically with associated light chains, as described in, e.g., U.S. Pat. No. 5,591,828; bispecific DNA-antibody conjugates, e.g., crosslinking of antibodies or Fab fragments through a double stranded piece of DNA, as described in, e.g., U.S. Pat. No. 5,635,602; bispecific fusion proteins, e.g., an expression construct containing two scFvs with a hydrophilic helical peptide linker between them and a full constant region, as described in, e.g., U.S. Pat. No. 5,637,481; multivalent and multispecific binding proteins, e.g., dimer of polypeptides having first domain with binding region of Ig heavy chain variable region, and second domain with binding region of Ig light chain variable region, generally termed diabodies (higher order structures are also encompassed creating for bispecifc, trispecific, or tetraspecific molecules, as described in, e.g., U.S. Pat. No. 5,837,242; minibody constructs with linked VL and VH chains further connected with peptide spacers to an antibody hinge region and CH3 region, which can be dimerized to form bispecific/multivalent molecules, as described in, e.g., U.S. Pat. No. 5,837,821; VH and VL domains linked with a short peptide linker (e.g., 5 or 10 amino acids) or no linker at all in either orientation, which can form dimers to form bispecific diabodies; trimers and tetramers, as described in, e.g., U.S. Pat. No. 5,844,094; String of VH domains (or VL domains in family members) connected by peptide linkages with crosslinkable groups at the C-terminus further associated with VL domains to form a series of FVs (or scFvs), as described in, e.g., U.S. Pat. No. 5,864,019; and single chain binding polypeptides with both a VH and a VL domain linked through a peptide linker are combined into multivalent structures through non-covalent or chemical crosslinking to form, e.g., homobivalent, heterobivalent, trivalent, and tetravalent structures using both scFV or diabody type format, as described in, e.g., U.S. Pat. No. 5,869,620. Additional exemplary multispecific and bispecific molecules and methods of making the same are found, for example, in U.S. Pat. Nos. 5,910,573, 5,932,448, 5,959,083, 5,989,830, 6,005,079, 6,239,259, 6,294,353, 6,333,396, 6,476,198, 6,511,663, 6,670,453, 6,743,896, 6,809,185, 6,833,441, 7,129,330, 7,183,076, 7,521,056, 7,527,787, 7,534,866, 7,612,181, US2002004587A1, US2002076406A1, US2002103345A1, US2003207346A1, US2003211078A1, US2004219643A1, US2004220388A1, US2004242847A1, US2005003403A1, US2005004352A1, US2005069552A1, US2005079170A1, US2005100543A1, US2005136049A1, US2005136051A1, US2005163782A1, US2005266425A1, US2006083747A1, US2006120960A1, US2006204493A1, US2006263367A1, US2007004909A1, US2007087381A1, US2007128150A1, US2007141049A1, US2007154901A1, US2007274985A1, US2008050370A1, US2008069820A1, US2008152645A1, US2008171855A1, US2008241884A1, US2008254512A1, US2008260738A1, US2009130106A1, US2009148905A1, US2009155275A1, US2009162359A1, US2009162360A1, US2009175851A1, US2009175867A1, US2009232811A1, US2009234105A1, US2009263392A1, US2009274649A1, EP346087A2, WO0006605A2, WO02072635A2, WO04081051A1, WO06020258A2, WO2007044887A2, WO2007095338A2, WO2007137760A2, WO2008119353A1, WO2009021754A2, WO2009068630A1, WO9103493A1, WO9323537A1, WO9409131A1, WO9412625A2, WO9509917A1, WO9637621A2, WO9964460A1. The contents of the above-referenced applications are incorporated herein by reference in their entireties.

[0586] Within each antibody or antibody fragment (e.g., scFv) of a bispecific antibody molecule, the VH can be upstream or downstream of the VL. In some embodiments, the upstream antibody or antibody fragment (e.g., scFv) is arranged with its VH (VH₁) upstream of its VL (VL₁) and the downstream antibody or antibody fragment (e.g., scFv) is arranged with its VL (VL₂) upstream of its VH (VH₂), such that the overall bispecific antibody molecule has the arrangement VH₁-VL₁-VL₂-VH₂. In other embodiments, the upstream antibody or antibody fragment (e.g., scFv) is arranged with its VL (VL₁) upstream of its VH (VH₁) and the downstream antibody or antibody fragment (e.g., scFv) is arranged with its VH (VH₂) upstream of its VL (VL₂), such that the overall bispecific antibody molecule has the arrangement VL₁-VH₁-VH₂-VL₂. Optionally, a linker is disposed between the two antibodies or antibody fragments (e.g., scFvs), e.g., between VL₁ and VL₂ if the construct is arranged as VH₁-VL₁-VL₂-VH₂, or between VH₁ and VH₂ if the construct is arranged as VL₁-VH₁-VH₂-VL₂. The linker may be a linker as described herein, e.g., a (Gly₄-Ser) n linker, wherein n is 1, 2, 3, 4, 5, or 6, preferably 4 (SEQ ID NO: 78). In general, the linker between the two scFvs should be long enough to avoid mispairing between the domains of the two scFvs. Optionally, a linker is disposed between the VL and VH of the first scFv. Optionally, a linker is disposed between the VL and VH of the second scFv. In constructs that have multiple linkers, any two or more of the linkers can be the same or different. Accordingly, in some embodiments, a bispecific CAR comprises VLs, VHs, and optionally one or more linkers in an arrangement as described herein.

### Stability and Mutations

[0587] The stability of an antigen binding domain to a cancer associated antigen as described herein, e.g., scFv molecules (e.g., soluble scFv), can be evaluated in reference to the biophysical properties (e.g., thermal stability) of a conventional control scFv molecule or a full length antibody. In one embodiment, the humanized scFv has a thermal stability that is greater than about 0.1, about 0.25, about 0.5, about 0.75, about 1, about 1.25, about 1.5, about 1.75, about 2, about 2.5, about 3, about 3.5, about 4, about 4.5, about 5, about 5.5, about 6, about 6.5, about 7, about 7.5, about 8, about 8.5, about 9, about 9.5, about 10 degrees, about 11 degrees, about 12 degrees, about 13 degrees, about 14 degrees, or about 15 degrees Celsius than a control binding molecule (e.g. a conventional scFv molecule) in the described assays.

[0588] The improved thermal stability of the antigen binding domain to a cancer associated antigen described herein, e.g., scFv is subsequently conferred to the entire CAR construct, leading to improved therapeutic properties of the CAR construct. The thermal stability of the antigen binding domain of—a cancer associated antigen described herein, e.g., scFv, can be improved by at least about 2° C. or 3° C. as compared to a conventional antibody. In one embodiment, the antigen binding domain of—a cancer associated antigen described herein, e.g., scFv, has a 1° C. improved thermal stability as compared to a conventional antibody. In another embodiment, the antigen binding domain of a cancer associated antigen described herein, e.g., scFv, has a 2° C. improved thermal stability as compared to a conventional antibody. In another embodiment, the scFv has a 4, 5, 6, 7, 8, 9, 10, 11, 12, 13, 14, 15° C. improved thermal stability as compared to a conventional antibody. Comparisons can be made, for example, between the scFv molecules disclosed herein and scFv molecules or Fab fragments of an antibody from which the scFv VH and VL were derived. Thermal stability can be measured using methods known in the art. For example, in one embodiment, Tm can be measured. Methods for measuring Tm and other methods of determining protein stability are described in more detail below.

[0589] Mutations in scFv (arising through humanization or direct mutagenesis of the soluble scFv) can alter the stability of the scFv and improve the overall stability of the scFv and the CAR construct. Stability of the humanized scFv is compared against the murine scFv using measurements such as Tm, temperature denaturation and temperature aggregation.

[0590] The binding capacity of the mutant scFvs can be determined using assays know in the art and described herein.

[0591] In one embodiment, the antigen binding domain of a cancer associated antigen described herein, e.g., scFv, comprises at least one mutation arising from the humanization process such that the mutated scFv confers improved stability to the CAR construct. In another embodiment, the antigen binding domain of—a cancer associated antigen described herein, e.g., scFv, comprises at least 1, 2, 3, 4, 5, 6, 7, 8, 9, 10 mutations arising from the humanization process such that the mutated scFv confers improved stability to the CAR construct.

### Methods of Evaluating Protein Stability

[0592] The stability of an antigen binding domain may be assessed using, e.g., the methods described below. Such methods allow for the determination of multiple thermal unfolding transitions where the least stable domain either unfolds first or limits the overall stability threshold of a multidomain unit that unfolds cooperatively (e.g., a multidomain protein which exhibits a single unfolding transition). The least stable domain can be identified in a number of additional ways. Mutagenesis can be performed to probe which domain limits the overall stability. Additionally, protease resistance of a multidomain protein can be performed under conditions where the least stable domain is known to be intrinsically unfolded via DSC or other spectroscopic methods (Fontana, et al., (1997) Fold. Des., 2: R17-26; Dimasi et al. (2009) J. Mol. Biol. 393:672-692). Once the least stable domain is identified, the sequence encoding this domain (or a portion thereof) may be employed as a test sequence in the methods.

### Thermal Stability

[0593] The thermal stability of the compositions may be analyzed using a number of non-limiting biophysical or biochemical techniques known in the art. In certain embodiments, thermal stability is evaluated by analytical spectroscopy.

[0594] An exemplary analytical spectroscopy method is Differential Scanning calorimetry (DSC). DSC employs a calorimeter which is sensitive to the heat absorbances that accompany the unfolding of most proteins or protein domains (see, e.g. Sanchez-Ruiz, et al., Biochemistry, 27:1648-52, 1988). To determine the thermal stability of a protein, a sample of the protein is inserted into the calorimeter and the temperature is raised until the Fab or scFv unfolds. The temperature at which the protein unfolds is indicative of overall protein stability.

[0595] Another exemplary analytical spectroscopy method is Circular Dichroism (CD) spectroscopy. CD spectrometry measures the optical activity of a composition as a function of increasing temperature. Circular dichroism (CD) spectroscopy measures differences in the absorption of left-handed polarized light versus right-handed polarized light which arise due to structural asymmetry. A disordered or unfolded structure results in a CD spectrum very different from that of an ordered or folded structure. The CD spectrum reflects the sensitivity of the proteins to the denaturing effects of increasing temperature and is therefore indicative of a protein's thermal stability (see van Mierlo and Steemsma, J. Biotechnol., 79 (3): 281-98, 2000).

[0596] Another exemplary analytical spectroscopy method for measuring thermal stability is Fluorescence Emission Spectroscopy (see van Mierlo and Steemsma, supra). Yet another exemplary analytical spectroscopy method for measuring thermal stability is Nuclear Magnetic Resonance (NMR) spectroscopy (see, e.g. van Mierlo and Steemsma, supra). The thermal stability of a composition can be measured biochemically. An exemplary biochemical method for assessing thermal stability is a thermal challenge assay. In a “thermal challenge assay”, a composition is subjected to a range of elevated temperatures for a set period of time. For example, in one embodiment, test scFv molecules or molecules comprising scFv molecules are subject to a range of increasing temperatures, e.g., for 1-1.5 hours. The activity of the protein is then assayed by a relevant biochemical assay. For example, if the protein is a binding protein (e.g. an scFv or scFv-containing polypeptide) the binding activity of the binding protein may be determined by a functional or quantitative ELISA.

[0597] Such an assay may be done in a high-throughput format and those disclosed in the Examples using E. coli and high throughput screening. A library of antigen binding domains, e.g., that includes an antigen binding domain to—a cancer associated antigen described herein, e.g., scFv variants, may be created using methods known in the art. Antigen binding domain, e.g., to—a cancer associated antigen described herein, e.g., scFv, expression may be induced and the antigen binding domain, e.g., to—a cancer associated antigen described herein, e.g., scFv, may be subjected to thermal challenge. The challenged test samples may be assayed for binding and those antigen binding domains to—a cancer associated antigen described herein, e.g., scFvs, which are stable may be scaled up and further characterized.

[0598] Thermal stability is evaluated by measuring the melting temperature (Tm) of a composition using any of the above techniques (e.g. analytical spectroscopy techniques). The melting temperature is the temperature at the midpoint of a thermal transition curve wherein 50% of molecules of a composition are in a folded state (See e.g., Dimasi et al. (2009) J. Mol Biol. 393:672-692). In one embodiment, Tm values for an antigen binding domain to—a cancer associated antigen described herein, e.g., scFv, are about 40° C., 41° C., 42° C., 43° C., 44° C., 45° C., 46° C., 47° C., 48° C., 49° C., 50° C., 51° C., 52° C., 53° C., 54° C., 55° C., 56° C., 57° C., 58° C., 59° C., 60° C., 61° C., 62° C., 63° C., 64° C., 65° C., 66° C., 67° C., 68° C., 69° C., 70° C., 71° C., 72° C., 73° C., 74° C., 75° C., 76° C., 77° C., 78° C., 79° C., 80° C., 81° C., 82° C., 83° C., 84° C., 85° C., 86° C., 87° C., 88° C., 89° C., 90° C., 91° C., 92° C., 93° C., 94° C., 95° C., 96° C., 97° C., 98° C., 99° C., 100° C. In one embodiment, Tm values for an IgG is about 40° C., 41° C., 42° C., 43° C., 44° C., 45° C., 46° C., 47° C., 48° C., 49° C., 50° C., 51° C., 52° C., 53° C., 54° C., 55° C., 56° C., 57° C., 58° C., 59° C., 60° C., 61° C., 62° C., 63° C., 64° C., 65° C., 66° C., 67° C., 68° C., 69° C., 70° C., 71° C., 72° C., 73° C., 74° C., 75° C., 76° C., 77° C., 78° C., 79° C., 80° C., 81° C., 82° C., 83° C., 84° C., 85° C., 86° C., 87° C., 88° C., 89° C., 90° C., 91° C., 92° C., 93° C., 94° C., 95° C., 96° C., 97° C., 98° C., 99° C., 100° C. In one embodiment, Tm values for an multivalent antibody is about 40° C., 41° C., 42° C., 43° C., 44° C., 45° C., 46° C., 47° C., 48° C., 49° C., 50° C., 51° C., 52° C., 53° C., 54° C., 55° C., 56° C., 57° C., 58° C., 59° C., 60° C., 61° C., 62° C., 63° C., 64° C., 65° C., 66° C., 67° C., 68° C., 69° C., 70° C., 71° C., 72° C., 73° C., 74° C., 75° C., 76° C., 77° C., 78° C., 79° C., 80° C., 81° C., 82° C., 83° C., 84° C., 85° C., 86° C., 87° C., 88° C., 89° C., 90° C., 91° C., 92° C., 93° C., 94° C., 95° C., 96° C., 97° C., 98° C., 99° C., 100° C.

[0599] Thermal stability is also evaluated by measuring the specific heat or heat capacity (Cp) of a composition using an analytical calorimetric technique (e.g. DSC). The specific heat of a composition is the energy (e.g. in kcal/mol) is required to rise by 1° C., the temperature of 1 mol of water. As large Cp is a hallmark of a denatured or inactive protein composition. The change in heat capacity (□Cp) of a composition is measured by determining the specific heat of a composition before and after its thermal transition. Thermal stability may also be evaluated by measuring or determining other parameters of thermodynamic stability including Gibbs free energy of unfolding (□G), enthalpy of unfolding (□H), or entropy of unfolding(□S). One or more of the above biochemical assays (e.g. a thermal challenge assay) are used to determine the temperature (i.e. the T_{C} value) at which 50% of the composition retains its activity (e.g. binding activity).

[0600] In addition, mutations to the antigen binding domain of a cancer associated antigen described herein, e.g., scFv, can be made to alter the thermal stability of the antigen binding domain of a cancer associated antigen described herein, e.g., scFv, as compared with the unmutated antigen binding domain of a cancer associated antigen described herein, e.g., scFv. When the humanized antigen binding domain of a cancer associated antigen described herein, e.g., scFv, is incorporated into a CAR construct, the antigen binding domain of the cancer associated antigen described herein, e.g., humanized scFv, confers thermal stability to the overall CARs of the present invention. In one embodiment, the antigen binding domain to a cancer associated antigen described herein, e.g., scFv, comprises a single mutation that confers thermal stability to the antigen binding domain of the cancer associated antigen described herein, e.g., scFv. In another embodiment, the antigen binding domain to a cancer associated antigen described herein, e.g., scFv, comprises multiple mutations that confer thermal stability to the antigen binding domain to the cancer associated antigen described herein, e.g., scFv. In one embodiment, the multiple mutations in the antigen binding domain to a cancer associated antigen described herein, e.g., scFv, have an additive effect on thermal stability of the antigen binding domain to the cancer associated antigen described herein binding domain, e.g., scFv.

### b) % Aggregation

[0601] The stability of a composition can be determined by measuring its propensity to aggregate. Aggregation can be measured by a number of non-limiting biochemical or biophysical techniques. For example, the aggregation of a composition may be evaluated using chromatography, e.g. Size-Exclusion Chromatography (SEC). SEC separates molecules on the basis of size. A column is filled with semi-solid beads of a polymeric gel that will admit ions and small molecules into their interior but not large ones. When a protein composition is applied to the top of the column, the compact folded proteins (i.e. non-aggregated proteins) are distributed through a larger volume of solvent than is available to the large protein aggregates. Consequently, the large aggregates move more rapidly through the column, and in this way the mixture can be separated or fractionated into its components. Each fraction can be separately quantified (e.g. by light scattering) as it elutes from the gel. Accordingly, the % aggregation of a composition can be determined by comparing the concentration of a fraction with the total concentration of protein applied to the gel. Stable compositions elute from the column as essentially a single fraction and appear as essentially a single peak in the elution profile or chromatogram.

### c) Binding Affinity

[0602] The stability of a composition can be assessed by determining its target binding affinity. A wide variety of methods for determining binding affinity are known in the art. An exemplary method for determining binding affinity employs surface plasmon resonance. Surface plasmon resonance is an optical phenomenon that allows for the analysis of real-time biospecific interactions by detection of alterations in protein concentrations within a biosensor matrix, for example using the BIAcore system (Pharmacia Biosensor AB, Uppsala, Sweden and Piscataway, N.J.). For further descriptions, see Jonsson, U., et al. (1993) Ann. Biol. Clin. 51:19-26; Jonsson, U., i (1991) Biotechniques 11:620-627; Johnsson, B., et al. (1995) J. Mol. Recognit. 8:125-131; and Johnnson, B., et al. (1991) Anal. Biochem. 198:268-277.

[0603] In one aspect, the antigen binding domain of the CAR comprises an amino acid sequence that is homologous to an antigen binding domain amino acid sequence described herein, and the antigen binding domain retains the desired functional properties of the antigen binding domain described herein.

[0604] In one specific aspect, the CAR composition of the invention comprises an antibody fragment. In a further aspect, the antibody fragment comprises an scFv.

[0605] In various aspects, the antigen binding domain of the CAR is engineered by modifying one or more amino acids within one or both variable regions (e.g., VH and/or VL), for example within one or more CDR regions and/or within one or more framework regions. In one specific aspect, the CAR composition of the invention comprises an antibody fragment. In a further aspect, the antibody fragment comprises an scFv.

[0606] It will be understood by one of ordinary skill in the art that the antibody or antibody fragment of the invention may further be modified such that they vary in amino acid sequence (e.g., from wild-type), but not in desired activity. For example, additional nucleotide substitutions leading to amino acid substitutions at “non-essential” amino acid residues may be made to the protein For example, a nonessential amino acid residue in a molecule may be replaced with another amino acid residue from the same side chain family. In another embodiment, a string of amino acids can be replaced with a structurally similar string that differs in order and/or composition of side chain family members, e.g., a conservative substitution, in which an amino acid residue is replaced with an amino acid residue having a similar side chain, may be made.

[0607] Families of amino acid residues having similar side chains have been defined in the art, including basic side chains (e.g., lysine, arginine, histidine), acidic side chains (e.g., aspartic acid, glutamic acid), uncharged polar side chains (e.g., glycine, asparagine, glutamine, serine, threonine, tyrosine, cysteine), nonpolar side chains (e.g., alanine, valine, leucine, isoleucine, proline, phenylalanine, methionine, tryptophan), beta-branched side chains (e.g., threonine, valine, isoleucine) and aromatic side chains (e.g., tyrosine, phenylalanine, tryptophan, histidine).

[0608] Percent identity in the context of two or more nucleic acids or polypeptide sequences, refers to two or more sequences that are the same. Two sequences are “substantially identical” if two sequences have a specified percentage of amino acid residues or nucleotides that are the same (e.g., 60% identity, optionally 70%, 71%, 72%, 73%, 74%, 75%, 76%, 77%, 78%, 79%, 80%, 81%, 82%, 83%, 84%, 85%, 86%, 87%, 88%, 89%, 90%, 91%, 92%, 93%, 94%, 95%, 96%, 97%, 98%, 99% identity over a specified region, or, when not specified, over the entire sequence), when compared and aligned for maximum correspondence over a comparison window, or designated region as measured using one of the following sequence comparison algorithms or by manual alignment and visual inspection. Optionally, the identity exists over a region that is at least about 50 nucleotides (or 10 amino acids) in length, or more preferably over a region that is 100 to 500 or 1000 or more nucleotides (or 20, 50, 200 or more amino acids) in length.

[0609] For sequence comparison, typically one sequence acts as a reference sequence, to which test sequences are compared. When using a sequence comparison algorithm, test and reference sequences are entered into a computer, subsequence coordinates are designated, if necessary, and sequence algorithm program parameters are designated. Default program parameters can be used, or alternative parameters can be designated. The sequence comparison algorithm then calculates the percent sequence identities for the test sequences relative to the reference sequence, based on the program parameters. Methods of alignment of sequences for comparison are well known in the art. Optimal alignment of sequences for comparison can be conducted, e.g., by the local homology algorithm of Smith and Waterman, (1970) Adv. Appl. Math. 2: 482c, by the homology alignment algorithm of Needleman and Wunsch, (1970) J. Mol. Biol. 48:443, by the search for similarity method of Pearson and Lipman, (1988) Proc. Nat'l. Acad. Sci. USA 85:2444, by computerized implementations of these algorithms (GAP, BESTFIT, FASTA, and TFASTA in the Wisconsin Genetics Software Package, Genetics Computer Group, 575 Science Dr., Madison, WI), or by manual alignment and visual inspection (see, e.g., Brent et al., (2003) Current Protocols in Molecular Biology).

[0610] Two examples of algorithms that are suitable for determining percent sequence identity and sequence similarity are the BLAST and BLAST 2.0 algorithms, which are described in Altschul et al., (1977) Nuc. Acids Res. 25:3389-3402; and Altschul et al., (1990) J. Mol. Biol. 215:403-410, respectively. Software for performing BLAST analyses is publicly available through the National Center for Biotechnology Information.

[0611] The percent identity between two amino acid sequences can also be determined using the algorithm of E. Meyers and W. Miller, (1988) Comput. Appl. Biosci. 4:11-17) which has been incorporated into the ALIGN program (version 2.0), using a PAM120 weight residue table, a gap length penalty of 12 and a gap penalty of 4. In addition, the percent identity between two amino acid sequences can be determined using the Needleman and Wunsch (1970) J. Mol. Biol. 48:444-453) algorithm which has been incorporated into the GAP program in the GCG software package (available at www.gcg.com), using either a Blossom 62 matrix or a PAM250 matrix, and a gap weight of 16, 14, 12, 10, 8, 6, or 4 and a length weight of 1, 2, 3, 4, 5, or 6.

[0612] In one aspect, the present invention contemplates modifications of the starting antibody or fragment (e.g., scFv) amino acid sequence that generate functionally equivalent molecules. For example, the VH or VL of an antigen binding domain to—a cancer associated antigen described herein, e.g., scFv, comprised in the CAR can be modified to retain at least about 70%, 71%, 72%, 73%, 74%, 75%, 76%, 77%, 78%, 79%, 80%, 81%, 82%, 83%, 84%, 85%, 86%, 87%, 88%, 89%, 90%, 91%, 92%, 93%, 94%, 95%, 96%, 97%, 98%, 99% identity of the starting VH or VL framework region of the antigen binding domain to the cancer associated antigen described herein, e.g., scFv. The present invention contemplates modifications of the entire CAR construct, e.g., modifications in one or more amino acid sequences of the various domains of the CAR construct in order to generate functionally equivalent molecules. The CAR construct can be modified to retain at least about 70%, 71%, 72%, 73%, 74%, 75%, 76%, 77%, 78%, 79%, 80%, 81%, 82%, 83%, 84%, 85%, 86%, 87%, 88%, 89%, 90%, 91%, 92%, 93%, 94%, 95%, 96%, 97%, 98%, 99% identity of the starting CAR construct.

### Transmembrane Domain

[0613] With respect to the transmembrane domain, in various embodiments, a CAR can be designed to comprise a transmembrane domain that is attached to the extracellular domain of the CAR. A transmembrane domain can include one or more additional amino acids adjacent to the transmembrane region, e.g., one or more amino acid associated with the extracellular region of the protein from which the transmembrane was derived (e.g., 1, 2, 3, 4, 5, 6, 7, 8, 9, 10 up to 15 amino acids of the extracellular region) and/or one or more additional amino acids associated with the intracellular region of the protein from which the transmembrane protein is derived (e.g., 1, 2, 3, 4, 5, 6, 7, 8, 9, 10 up to 15 amino acids of the intracellular region). In one aspect, the transmembrane domain is one that is associated with one of the other domains of the CAR e.g., in one embodiment, the transmembrane domain may be from the same protein that the signaling domain, costimulatory domain or the hinge domain is derived from. In another aspect, the transmembrane domain is not derived from the same protein that any other domain of the CAR is derived from. In some instances, the transmembrane domain can be selected or modified by amino acid substitution to avoid binding of such domains to the transmembrane domains of the same or different surface membrane proteins, e.g., to minimize interactions with other members of the receptor complex. In one aspect, the transmembrane domain is capable of homodimerization with another CAR on the cell surface of a CAR-expressing cell. In a different aspect, the amino acid sequence of the transmembrane domain may be modified or substituted so as to minimize interactions with the binding domains of the native binding partner present in the same CAR-expressing cell.

[0614] The transmembrane domain may be derived either from a natural or from a recombinant source. Where the source is natural, the domain may be derived from any membrane-bound or transmembrane protein. In one aspect the transmembrane domain is capable of signaling to the intracellular domain(s) whenever the CAR has bound to a target. A transmembrane domain of particular use in this invention may include at least the transmembrane region(s) of e.g., the alpha, beta or zeta chain of the T-cell receptor, CD28, CD27, CD3 epsilon, CD45, CD4, CD5, CD8, CD9, CD16, CD22, CD33, CD37, CD64, CD80, CD86, CD134, CD137, CD154. In some embodiments, a transmembrane domain may include at least the transmembrane region(s) of, e.g., KIRDS2, OX40, CD2, CD27, LFA-1 (CD11a, CD18), ICOS (CD278), 4-1BB (CD137), GITR, CD40, BAFFR, HVEM (LIGHTR), SLAMF7, NKp80 (KLRF1), NKp44, NKp30, NKp46, CD160, CD19, IL2R beta, IL2R gamma, IL7R a, ITGA1, VLA1, CD49a, ITGA4, IA4, CD49D, ITGA6, VLA-6, CD49f, ITGAD, CD11d, ITGAE, CD103, ITGAL, CD11a, LFA-1, ITGAM, CD11b, ITGAX, CD11c, ITGB1, CD29, ITGB2, CD18, LFA-1, ITGB7, TNFR2, DNAM1 (CD226), SLAMF4 (CD244, 2B4), CD84, CD96 (Tactile), CEACAM1, CRTAM, Ly9 (CD229), CD160 (BY55), PSGL1, CD100 (SEMA4D), SLAMF6 (NTB-A, Ly108), SLAM (SLAMF1, CD150, IPO-3), BLAME (SLAMF8), SELPLG (CD162), LTBR, PAG/Cbp, NKG2D, NKG2C.

[0615] In some instances, the transmembrane domain can be attached to the extracellular region of the CAR, e.g., the antigen binding domain of the CAR, via a hinge, e.g., a hinge from a human protein. For example, in one embodiment, the hinge can be a human Ig (immunoglobulin) hinge (e.g., an IgG4 hinge, an IgD hinge), a GS linker (e.g., a GS linker described herein), a KIR2DS2 hinge or a CD8a hinge. In one embodiment, the hinge or spacer comprises (e.g., consists of) the amino acid sequence of SEQ ID NO:403. In one aspect, the transmembrane domain comprises (e.g., consists of) a transmembrane domain of SEQ ID NO: 12.

[0616] In one aspect, the hinge or spacer comprises an IgG4 hinge. For example, in one embodiment, the hinge or spacer comprises a hinge of the amino acid sequence ESKYGPPCPPCPAPEFLGGPSVFLFPPKPKDTLMISRTPEVTCVVVDVSQEDPEVQFN WYVDGVEVHNAKTKPREEQFNSTYRVVSVLTVLHQDWLNGKEYKCKVSNKGLPS SIEKTISKAKGQPREPQVYTLPPSQEEMTKNQVSLTCLVKGFYPSDIA VEWESNGQP ENNYKTTPPVLDSDGSFFLYSRLTVDKSRWQEGNVFSCSVMHEALHNHYTQKSLS LSLGKM (SEQ ID NO:405). In some embodiments, the hinge or spacer comprises a hinge encoded by a nucleotide sequence of

(SEQ ID NO: 406)
GAGAGCAAGTACGGCCCTCCCTGCCCCCCTTGCCCTGCCCCCGAGTTCCT
GGGCGGACCCAGCGTGTTCCTGTTCCCCCCCAAGCCCAAGGACACCCTGA
TGATCAGCCGGACCCCCGAGGTGACCTGTGTGGTGGTGGACGTGTCCCAG
GAGGACCCCGAGGTCCAGTTCAACTGGTACGTGGACGGCGTGGAGGTGCA
CAACGCCAAGACCAAGCCCCGGGAGGAGCAGTTCAATAGCACCTACCGGG
TGGTGTCCGTGCTGACCGTGCTGCACCAGGACTGGCTGAACGGCAAGGAA
TACAAGTGTAAGGTGTCCAACAAGGGCCTGCCCAGCAGCATCGAGAAAAC
CATCAGCAAGGCCAAGGGCCAGCCTCGGGAGCCCCAGGTGTACACCCTGC
CCCCTAGCCAAGAGGAGATGACCAAGAACCAGGTGTCCCTGACCTGCCTG
GTGAAGGGCTTCTACCCCAGCGACATCGCCGTGGAGTGGGAGAGCAACGG
CCAGCCCGAGAACAACTACAAGACCACCCCCCCTGTGCTGGACAGCGACG
GCAGCTTCTTCCTGTACAGCCGGCTGACCGTGGACAAGAGCCGGTGGCAG
GAGGGCAACGTCTTTAGCTGCTCCGTGATGCACGAGGCCCTGCACAACCA
CTACACCCAGAAGAGCCTGAGCCTGTCCCTGGGCAAGATG.

[0617] In one aspect, the hinge or spacer comprises an IgD hinge. For example, in one embodiment, the hinge or spacer comprises a hinge of the amino acid sequence RWPESPKAQASSVPTAQPQAEGSLAKATTAPATTRNTGRGGEEKKKEKEKEEQEE RETKTPECPSHTQPLGVYLLTPAVQDLWLRDKATFTCFVVGSDLKDAHLTWEVAG KVPTGGVEEGLLERHSNGSQSQHSRLTLPRSLWNAGTSVTCTLNHPSLPPQRLMAL REPAAQAPVKLSLNLLASSDPPEAASWLLCEVSGFSPPNILLMWLEDQREVNTSGF APARPPPQPGSTTFWAWSVLRVPAPPSPQPATYTCVVSHEDSRTLLNASRSLEVSYV TDH (SEQ ID NO:407). In some embodiments, the hinge or spacer comprises a hinge encoded by a nucleotide sequence of

(SEQ ID NO: 408)
AGGTGGCCCGAAAGTCCCAAGGCCCAGGCATCTAGTGTTCCTACTGCACA
GCCCCAGGCAGAAGGCAGCCTAGCCAAAGCTACTACTGCACCTGCCACTA
CGCGCAATACTGGCCGTGGCGGGGAGGAGAAGAAAAAGGAGAAAGAGAAA
GAAGAACAGGAAGAGAGGGAGACCAAGACCCCTGAATGTCCATCCCATAC
CCAGCCGCTGGGCGTCTATCTCTTGACTCCCGCAGTACAGGACTTGTGGC
TTAGAGATAAGGCCACCTTTACATGTTTCGTCGTGGGCTCTGACCTGAAG
GATGCCCATTTGACTTGGGAGGTTGCCGGAAAGGTACCCACAGGGGGGGT
TGAGGAAGGGTTGCTGGAGCGCCATTCCAATGGCTCTCAGAGCCAGCACT
CAAGACTCACCCTTCCGAGATCCCTGTGGAACGCCGGGACCTCTGTCACA
TGTACTCTAAATCATCCTAGCCTGCCCCCACAGCGTCTGATGGCCCTTAG
AGAGCCAGCCGCCCAGGCACCAGTTAAGCTTAGCCTGAATCTGCTCGCCA
GTAGTGATCCCCCAGAGGCCGCCAGCTGGCTCTTATGCGAAGTGTCCGGC
TTTAGCCCGCCCAACATCTTGCTCATGTGGCTGGAGGACCAGCGAGAAGT
GAACACCAGCGGCTTCGCTCCAGCCCGGCCCCCACCCCAGCCGGGTTCTA
CCACATTCTGGGCCTGGAGTGTCTTAAGGGTCCCAGCACCACCTAGCCCC
CAGCCAGCCACATACACCTGTGTTGTGTCCCATGAAGATAGCAGGACCCT
GCTAAATGCTTCTAGGAGTCTGGAGGTTTCCTACGTGACTGACCATT.

[0618] In one aspect, the transmembrane domain may be recombinant, in which case it will comprise predominantly hydrophobic residues such as leucine and valine. In one aspect a triplet of phenylalanine, tryptophan and valine can be found at each end of a recombinant transmembrane domain.

[0619] Optionally, a short oligo- or polypeptide linker, between 2 and 10 amino acids in length may form the linkage between the transmembrane domain and the cytoplasmic region of the CAR. A glycine-serine doublet provides a particularly suitable linker. For example, in one aspect, the linker comprises the amino acid sequence of GGGGSGGGGS (SEQ ID NO:10). In some embodiments, the linker is encoded by a nucleotide sequence of

(SEQ ID NO: 11)
GGTGGCGGAGGTTCTGGAGGTGGAGGTTCC.

[0620] In one aspect, the hinge or spacer comprises a KIR2DS2 hinge.

### Cytoplasmic Domain

[0621] The cytoplasmic domain or region of the CAR includes an intracellular signaling domain. An intracellular signaling domain is generally responsible for activation of at least one of the normal effector functions of the immune cell in which the CAR has been introduced. The term “effector function” refers to a specialized function of a cell. Effector function of a T cell, for example, may be cytolytic activity or helper activity including the secretion of cytokines. Thus the term “intracellular signaling domain” refers to the portion of a protein which transduces the effector function signal and directs the cell to perform a specialized function. While usually the entire intracellular signaling domain can be employed, in many cases it is not necessary to use the entire chain. To the extent that a truncated portion of the intracellular signaling domain is used, such truncated portion may be used in place of the intact chain as long as it transduces the effector function signal. The term intracellular signaling domain is thus meant to include any truncated portion of the intracellular signaling domain sufficient to transduce the effector function signal.

[0622] Examples of intracellular signaling domains for use in the CAR of the invention include the cytoplasmic sequences of the T cell receptor (TCR) and co-receptors that act in concert to initiate signal transduction following antigen receptor engagement, as well as any derivative or variant of these sequences and any recombinant sequence that has the same functional capability.

[0623] It is known that signals generated through the TCR alone are insufficient for full activation of the T cell and that a secondary and/or costimulatory signal is also required. Thus, T cell activation can be said to be mediated by two distinct classes of cytoplasmic signaling sequences: those that initiate antigen-dependent primary activation through the TCR (primary intracellular signaling domains) and those that act in an antigen-independent manner to provide a secondary or costimulatory signal (secondary cytoplasmic domain, e.g., a costimulatory domain).

[0624] A primary signaling domain regulates primary activation of the TCR complex either in a stimulatory way, or in an inhibitory way. Primary intracellular signaling domains that act in a stimulatory manner may contain signaling motifs which are known as immunoreceptor tyrosine-based activation motifs or ITAMs.

[0625] Examples of ITAM containing primary intracellular signaling domains that are of particular use in the invention include those of CD3 zeta, common FcR gamma (FCER1G), Fc gamma RIIa, FcR beta (Fc Epsilon R1b), CD3 gamma, CD3 delta, CD3 epsilon, CD79a, CD79b, DAP10, and DAP12. In one embodiment, a CAR of the invention comprises an intracellular signaling domain, e.g., a primary signaling domain of CD3-zeta.

[0626] In one embodiment, a primary signaling domain comprises a modified ITAM domain, e.g., a mutated ITAM domain which has altered (e.g., increased or decreased) activity as compared to the native ITAM domain. In one embodiment, a primary signaling domain comprises a modified ITAM-containing primary intracellular signaling domain, e.g., an optimized and/or truncated ITAM-containing primary intracellular signaling domain. In an embodiment, a primary signaling domain comprises one, two, three, four or more ITAM motifs.

[0627] The intracellular signalling domain of the CAR can comprise the CD3-zeta signaling domain by itself or it can be combined with any other desired intracellular signaling domain(s) useful in the context of a CAR of the invention. For example, the intracellular signaling domain of the CAR can comprise a CD3 zeta chain portion and a costimulatory signaling domain. The costimulatory signaling domain refers to a portion of the CAR comprising the intracellular domain of a costimulatory molecule. A costimulatory molecule is a cell surface molecule other than an antigen receptor or its ligands that is required for an efficient response of lymphocytes to an antigen. Examples of such molecules include CD27, CD28, 4-1BB (CD137), OX40, CD30, CD40, PD-1, ICOS, lymphocyte function-associated antigen-1 (LFA-1), CD2, CD7, LIGHT, NKG2C, B7-H3, and a ligand that specifically binds with CD83, and the like. For example, CD27 costimulation has been demonstrated to enhance expansion, effector function, and survival of human CART cells in vitro and augments human T cell persistence and antitumor activity in vivo (Song et al. Blood. 2012; 119 (3): 696-706). Further examples of such costimulatory molecules include CDS, ICAM-1, GITR, BAFFR, HVEM (LIGHTR), SLAMF7, NKp80 (KLRF1), NKp44, NKp30, NKp46, CD160, CD19, CD4, CD8alpha, CD8beta, IL2R beta, IL2R gamma, IL7R alpha, ITGA4, VLA1, CD49a, ITGA4, IA4, CD49D, ITGA6, VLA-6, CD49f, ITGAD, CD11d, ITGAE, CD103, ITGAL, CD11a, LFA-1, ITGAM, CD11b, ITGAX, CD11c, ITGB1, CD29, ITGB2, CD18, LFA-1, ITGB7, TNFR2, TRANCE/RANKL, DNAMI (CD226), SLAMF4 (CD244, 2B4), CD84, CD96 (Tactile), NKG2D, CEACAM1, CRTAM, Ly9 (CD229), CD160 (BY55), PSGL1, CD100 (SEMA4D), CD69, SLAMF6 (NTB-A, Ly108), SLAM (SLAMF1, CD150, IPO-3), BLAME (SLAMF8), SELPLG (CD162), LTBR, LAT, GADS, SLP-76, PAG/Cbp, and CD19a.

[0628] The intracellular signaling sequences within the cytoplasmic portion of the CAR of the invention may be linked to each other in a random or specified order. Optionally, a short oligo- or polypeptide linker, for example, between 2 and 10 amino acids (e.g., 2, 3, 4, 5, 6, 7, 8, 9, or 10 amino acids) in length may form the linkage between intracellular signaling sequence. In one embodiment, a glycine-serine doublet can be used as a suitable linker. In one embodiment, a single amino acid, e.g., an alanine, a glycine, can be used as a suitable linker.

[0629] In one aspect, the intracellular signaling domain is designed to comprise two or more, e.g., 2, 3, 4, 5, or more, costimulatory signaling domains. In an embodiment, the two or more, e.g., 2, 3, 4, 5, or more, costimulatory signaling domains, are separated by a linker molecule, e.g., a linker molecule described herein. In one embodiment, the intracellular signaling domain comprises two costimulatory signaling domains. In some embodiments, the linker molecule is a glycine residue. In some embodiments, the linker is an alanine residue.

[0630] In one aspect, the intracellular signaling domain is designed to comprise the signaling domain of CD3-zeta. In one aspect, the intracellular signaling domain is designed to comprise the signaling domain of CD3-zeta, and the signaling domain of 4-1BB. In one aspect, the signaling domain of 4-1BB is a signaling domain of SEQ ID NO: 14. In one aspect, the signaling domain of CD3-zeta is a signaling domain of SEQ ID NO: 18.

[0631] In one aspect, the intracellular signaling domain is designed to comprise the signaling domain of CD3-zeta and the signaling domain of CD27. In one aspect, the signaling domain of CD27 comprises an amino acid sequence of

(SEQ ID NO: 16)
QRRKYRSNKGESPVEPAEPCRYSCPREEEGSTIPIQEDYRKPEPACSP.

[0632] In one aspect, the signalling domain of CD27 is encoded by a nucleic acid sequence of

(SEQ ID NO: 17)
AGGAGTAAGAGGAGCAGGCTCCTGCACAGTGACTACATGAACATGACTCC
CCGCCGCCCCGGGCCCACCCGCAAGCATTACCAGCCCTATGCCCCACCAC
GCGACTTCGCAGCCTATCGCTCC.

[0633] In one aspect, the CAR-expressing cell described herein can further comprise a second CAR, e.g., a second CAR that includes a different antigen binding domain, e.g., to the same target or a different target (e.g., a target other than a cancer associated antigen described herein or a different cancer associated antigen described herein). In one embodiment, the second CAR includes an antigen binding domain to a target expressed the same cancer cell type as the cancer associated antigen. In one embodiment, the CAR-expressing cell comprises a first CAR that targets a first antigen and includes an intracellular signaling domain having a costimulatory signaling domain but not a primary signaling domain, and a second CAR that targets a second, different, antigen and includes an intracellular signaling domain having a primary signaling domain but not a costimulatory signaling domain. While not wishing to be bound by theory, placement of a costimulatory signaling domain, e.g., 4-1BB, CD28, CD27 or OX-40, onto the first CAR, and the primary signaling domain, e.g., CD3 zeta, on the second CAR can limit the CAR activity to cells where both targets are expressed. In one embodiment, the CAR expressing cell comprises a first cancer associated antigen CAR that includes an antigen binding domain that binds a target antigen described herein, a transmembrane domain and a costimulatory domain and a second CAR that targets a different target antigen (e.g., an antigen expressed on that same cancer cell type as the first target antigen) and includes an antigen binding domain, a transmembrane domain and a primary signaling domain. In another embodiment, the CAR expressing cell comprises a first CAR that includes an antigen binding domain that binds a target antigen described herein, a transmembrane domain and a primary signaling domain and a second CAR that targets an antigen other than the first target antigen (e.g., an antigen expressed on the same cancer cell type as the first target antigen) and includes an antigen binding domain to the antigen, a transmembrane domain and a costimulatory signaling domain.

[0634] In one embodiment, the CAR-expressing cell comprises an XCAR described herein and an inhibitory CAR. In one embodiment, the inhibitory CAR comprises an antigen binding domain that binds an antigen found on normal cells but not cancer cells. In one embodiment, the inhibitory CAR comprises the antigen binding domain, a transmembrane domain and an intracellular domain of an inhibitory molecule. For example, the intracellular domain of the inhibitory CAR can be an intracellular domain of PD1, PD-L1, CTLA4, TIM3, CEACAM (e.g., CEACAM-1, CEACAM-3 and/or CEACAM-5), LAG3, VISTA, BTLA, TIGIT, LAIR1, CD160, 2B4 or TGF beta.

[0635] In one embodiment, when the CAR-expressing cell comprises two or more different CARs, the antigen binding domains of the different CARs can be such that the antigen binding domains do not interact with one another. For example, a cell expressing a first and second CAR can have an antigen binding domain of the first CAR, e.g., as a fragment, e.g., an scFv, that does not form an association with the antigen binding domain of the second CAR, e.g., the antigen binding domain of the second CAR is a VHH.

[0636] In some embodiments, the antigen binding domain comprises a single domain antigen binding (SDAB) molecules include molecules whose complementary determining regions are part of a single domain polypeptide. Examples include, but are not limited to, heavy chain variable domains, binding molecules naturally devoid of light chains, single domains derived from conventional 4-chain antibodies, engineered domains and single domain scaffolds other than those derived from antibodies. SDAB molecules may be any of the art, or any future single domain molecules. SDAB molecules may be derived from any species including, but not limited to mouse, human, camel, llama, lamprey, fish, shark, goat, rabbit, and bovine. This term also includes naturally occurring single domain antibody molecules from species other than Camelidae and sharks.

[0637] In one aspect, an SDAB molecule can be derived from a variable region of the immunoglobulin found in fish, such as, for example, that which is derived from the immunoglobulin isotype known as Novel Antigen Receptor (NAR) found in the serum of shark. Methods of producing single domain molecules derived from a variable region of NAR (“IgNARs”) are described in WO 03/014161 and Streltsov (2005) Protein Sci. 14:2901-2909.

[0638] According to another aspect, an SDAB molecule is a naturally occurring single domain antigen binding molecule known as heavy chain devoid of light chains. Such single domain molecules are disclosed in WO 9404678 and Hamers-Casterman, C. et al. (1993) Nature 363:446-448, for example. For clarity reasons, this variable domain derived from a heavy chain molecule naturally devoid of light chain is known herein as a VHH or nanobody to distinguish it from the conventional VH of four chain immunoglobulins. Such a VHH molecule can be derived from Camelidae species, for example in camel, llama, dromedary, alpaca and guanaco. Other species besides Camelidae may produce heavy chain molecules naturally devoid of light chain; such VHHs are within the scope of the invention.

[0639] The SDAB molecules can be recombinant, CDR-grafted, humanized, camelized, de-immunized and/or in vitro generated (e.g., selected by phage display).

[0640] It has also been discovered, that cells having a plurality of chimeric membrane embedded receptors comprising an antigen binding domain that interactions between the antigen binding domain of the receptors can be undesirable, e.g., because it inhibits the ability of one or more of the antigen binding domains to bind its cognate antigen. Accordingly, disclosed herein are cells having a first and a second non-naturally occurring chimeric membrane embedded receptor comprising antigen binding domains that minimize such interactions. Also disclosed herein are nucleic acids encoding a first and a second non-naturally occurring chimeric membrane embedded receptor comprising antigen binding domains that minimize such interactions, as well as methods of making and using such cells and nucleic acids. In an embodiment the antigen binding domain of one of said first said second non-naturally occurring chimeric membrane embedded receptor, comprises an scFv, and the other comprises a single VH domain, e.g., a camelid, shark, or lamprey single VH domain, or a single VH domain derived from a human or mouse sequence.

[0641] In some embodiments, the claimed invention comprises a first and second CAR, wherein the antigen binding domain of one of said first CAR said second CAR does not comprise a variable light domain and a variable heavy domain. In some embodiments, the antigen binding domain of one of said first CAR said second CAR is an scFv, and the other is not an scFv. In some embodiments, the antigen binding domain of one of said first CAR said second CAR comprises a single VH domain, e.g., a camelid, shark, or lamprey single VH domain, or a single VH domain derived from a human or mouse sequence. In some embodiments, the antigen binding domain of one of said first CAR said second CAR comprises a nanobody. In some embodiments, the antigen binding domain of one of said first CAR said second CAR comprises a camelid VHH domain.

[0642] In some embodiments, the antigen binding domain of one of said first CAR said second CAR comprises an scFv, and the other comprises a single VH domain, e.g., a camelid, shark, or lamprey single VH domain, or a single VH domain derived from a human or mouse sequence. In some embodiments, the antigen binding domain of one of said first CAR said second CAR comprises an scFv, and the other comprises a nanobody. In some embodiments, the antigen binding domain of one of said first CAR said second CAR comprises an scFv, and the other comprises a camelid VHH domain.

[0643] In some embodiments, when present on the surface of a cell, binding of the antigen binding domain of said first CAR to its cognate antigen is not substantially reduced by the presence of said second CAR. In some embodiments, binding of the antigen binding domain of said first CAR to its cognate antigen in the presence of said second CAR is 85%, 90%, 95%, 96%, 97%, 98% or 99% of binding of the antigen binding domain of said first CAR to its cognate antigen in the absence of said second CAR.

[0644] In some embodiments, when present on the surface of a cell, the antigen binding domains of said first CAR said second CAR, associate with one another less than if both were scFv antigen binding domains. In some embodiments, the antigen binding domains of said first CAR said second CAR, associate with one another 85%, 90%, 95%, 96%, 97%, 98% or 99% less than if both were scFv antigen binding domains.

[0645] In another aspect, the CAR-expressing cell described herein can further express another agent, e.g., an agent which enhances the activity of a CAR-expressing cell. For example, in one embodiment, the agent can be an agent which inhibits an inhibitory molecule. Inhibitory molecules, e.g., PD1, can, in some embodiments, decrease the ability of a CAR-expressing cell to mount an immune effector response. Examples of inhibitory molecules include PD1, PD-L1, CTLA4, TIM3, CEACAM (e.g., CEACAM-1, CEACAM-3 and/or CEACAM-5), LAG3, VISTA, BTLA, TIGIT, LAIR1, CD160, 2B4 and TGF beta. In one embodiment, the agent which inhibits an inhibitory molecule, e.g., is a molecule described herein, e.g., an agent that comprises a first polypeptide, e.g., an inhibitory molecule, associated with a second polypeptide that provides a positive signal to the cell, e.g., an intracellular signaling domain described herein. In one embodiment, the agent comprises a first polypeptide, e.g., of an inhibitory molecule such as PD1, PD-L1, CTLA4, TIM3, CEACAM (e.g., CEACAM-1, CEACAM-3 and/or CEACAM-5), LAG3, VISTA, BTLA, TIGIT, LAIR1, CD160, 2B4 or TGF beta, or a fragment of any of these (e.g., at least a portion of an extracellular domain of any of these), and a second polypeptide which is an intracellular signaling domain described herein (e.g., comprising a costimulatory domain (e.g., 41BB, CD27 or CD28, e.g., as described herein) and/or a primary signaling domain (e.g., a CD3 zeta signaling domain described herein). In one embodiment, the agent comprises a first polypeptide of PD1 or a fragment thereof (e.g., at least a portion of an extracellular domain of PD1), and a second polypeptide of an intracellular signaling domain described herein (e.g., a CD28 signaling domain described herein and/or a CD3 zeta signaling domain described herein). PD1 is an inhibitory member of the CD28 family of receptors that also includes CD28, CTLA-4, ICOS, and BTLA. PD-1 is expressed on activated B cells, T cells and myeloid cells (Agata et al. 1996 Int. Immunol 8:765-75). Two ligands for PD1, PD-L1 and PD-L2 have been shown to downregulate T cell activation upon binding to PD1 (Freeman et a. 2000 J Exp Med 192:1027-34; Latchman et al. 2001 Nat Immunol 2:261-8; Carter et al. 2002 Eur J Immunol 32:634-43). PD-L1 is abundant in human cancers (Dong et al. 2003 J Mol Med 81:281-7; Blank et al. 2005 Cancer Immunol. Immunother 54:307-314; Konishi et al. 2004 Clin Cancer Res 10:5094). Immune suppression can be reversed by inhibiting the local interaction of PD1 with PD-L1.

[0646] In one embodiment, the agent comprises the extracellular domain (ECD) of an inhibitory molecule, e.g., Programmed Death 1 (PD1), fused to a transmembrane domain and intracellular signaling domains such as 41BB and CD3 zeta (also referred to herein as a PD1 CAR). In one embodiment, the PD1 CAR, when used in combinations with a XCAR described herein, improves the persistence of the T cell. In one embodiment, the CAR is a PD1 CAR comprising the extracellular domain of PD1 indicated as underlined in SEQ ID NO: 26. In one embodiment, the PD1 CAR comprises the amino acid sequence of SEQ ID NO: 26.

(SEQ ID NO: 26)
Malpvtalllplalllhaarppgwfldspdrpwnpptfspallvvtegdn
atftcsfsntsesfylnwyrmspsnqtdklaafpedrsqpgqdcrfrvtq
lpngrdfhmsvvrarrndsgtylcgaislapkaqikeslraelrvterra
evptahpspsprpagqfqtlvtttpaprpptpaptiasqplslrpeacrp
aaggavhtrgldfacdiyiwaplagtcgvlllslvitlyckrgrkkllyi
fkqpfmrpvqttqeedgcscrfpeeeeggcelrvkfsrsadapaykqgqn
qlynelnlgrreeydvldlkrgrdpemggkprrknpqeglynelqkdkma
eayseigmkgerrrgkghdglyqglstatkdtydalhmqalppr.

[0647] In one embodiment, the PD1 CAR comprises the amino acid sequence provided below (SEQ ID NO:39).

(SEQ ID NO: 39)
pgwfldspdrpwnpptfspallvvtegdnatftcsfsntsesfylnwyrm
spsnqtdklaafpedrsqpgqdcrfrvtqlpngrdfhmsvvrarrndsgt
ylcgaislapkaqikeshaelivterraevptahpspsprpagqfqtlvt
ttpaprpptpaptiasqplslrpeacrpaaggavhtrgldfacdiyiwap
lagtegvlllslvidyckrgrkkllyifkqpfmrpvqttqeedgcscrfp
eeeeggcelrvkfsrsadapaykqgqnqlynelnlgrreeydvldlargr
dpemggkprrknpqeglynelqkdkmaeayseigmkgerrrgkghdglyq
glstatkdtydalhmqalppr.

[0648] In one embodiment, the agent comprises a nucleic acid sequence encoding the PD1 CAR, e.g., the PD1 CAR described herein. In one embodiment, the nucleic acid sequence for the PD1 CAR is shown below, with the PD1 ECD underlined below in SEQ ID NO: 27

(SEQ ID NO: 27)
atggccctccctgtcactgccctgcactccccctcgcactcctgctccac
gccgctagaccacccggatggtttctggactctccggatcgcccgtggaa
tcccccaaccactcaccggcactcaggagtgactgagggcgataatgcga
ccacacgtgctcgttctccaacacctccgaatcattcgtgctgaactggt
accgcatgagcccgtcaaaccagaccgacaagctcgccgcgtaccggaag
atcggtcgcaaccgggacaggattgtcggaccgcgtgactcaactgccga
atggcagagacttccacatgagcgtggtccgcgctaggcgaaacgactcc
gggacctacctgtgcggagccatctcgctggcgcctaaggcccaaatcaa
agagagcttgagggccgaactgagagtgaccgagcgcagagctgaggtgc
caactgcacatccatccccatcgcctcggcctgcggggcagatcagaccc
tggtcacgaccactccggcgccgcgcccaccgactccggccccaactatc
gcgagccagcccctgtcgctgaggccggaagcatgccgccctgccgccgg
aggtgctgtgcatacccggggattggacttcgcatgcgacatctacattt
gggctcctctcgccggaacttgtggcgtgctccttctgtccctggtcatc
accctgtactgcaagcggggtcggaaaaagcttctgtacattttcaagca
gcccttcatgaggcccgtgcaaaccacccaggaggaggacggttgctcct
gccggttccccgaagaggaagaaggaggttgcgagctgcgcgtgaagact
cccggagcgccgacgcccccgcctataagcagggccagaaccagctgtac
aacgaactgaacctgggacggcgggaagagtacgatgtgctggacaagcg
gcgcggccgggaccccgaaatgggcgggaagcctagaagaaagaaccctc
aggaaggcctgtataacgagctgcagaaggacaagatggccgaggcctac
tccgaaattgggatgaagggagagcggcggaggggaaaggggcacgacgg
cctgtaccaaggactgtccaccgccaccaaggacacatacgatgccctgc
acatgcaggccatccccctcgc.

[0649] In another aspect, the present invention provides a population of CAR-expressing cells, e.g., CART cells. In some embodiments, the population of CAR-expressing cells comprises a mixture of cells expressing different CARs. For example, in one embodiment, the population of CART cells can include a first cell expressing a CAR having an antigen binding domain to a cancer associated antigen described herein, and a second cell expressing a CAR having a different antigen binding domain, e.g., an antigen binding domain to a different a cancer associated antigen described herein, e.g., an antigen binding domain to a cancer associated antigen described herein that differs from the cancer associated antigen bound by the antigen binding domain of the CAR expressed by the first cell. As another example, the population of CAR-expressing cells can include a first cell expressing a CAR that includes an antigen binding domain to a cancer associated antigen described herein, and a second cell expressing a CAR that includes an antigen binding domain to a target other than a cancer associated antigen as described herein. In one embodiment, the population of CAR-expressing cells includes, e.g., a first cell expressing a CAR that includes a primary intracellular signaling domain, and a second cell expressing a CAR that includes a secondary signaling domain.

[0650] In another aspect, the present invention provides a population of cells wherein at least one cell in the population expresses a CAR having an antigen binding domain to a cancer associated antigen described herein, and a second cell expressing another agent, e.g., an agent which enhances the activity of a CAR-expressing cell. For example, in one embodiment, the agent can be an agent which inhibits an inhibitory molecule. Inhibitory molecules, e.g., PD-1, can, in some embodiments, decrease the ability of a CAR-expressing cell to mount an immune effector response. Examples of inhibitory molecules include PD-1, PD-L1, CTLA4, TIM3, CEACAM (e.g., CEACAM-1, CEACAM-3 and/or CEACAM-5), LAG3, VISTA, BTLA, TIGIT, LAIR1, CD160, 2B4 and TGF beta. In one embodiment, the agent which inhibits an inhibitory molecule, e.g., is a molecule described herein, e.g., an agent that comprises a first polypeptide, e.g., an inhibitory molecule, associated with a second polypeptide that provides a positive signal to the cell, e.g., an intracellular signaling domain described herein. In one embodiment, the agent comprises a first polypeptide, e.g., of an inhibitory molecule such as PD-1, PD-L1, CTLA4, TIM3, CEACAM (e.g., CEACAM-1, CEACAM-3 and/or CEACAM-5), LAG3, VISTA, BTLA, TIGIT, LAIR1, CD160, 2B4 or TGF beta, or a fragment of any of these, and a second polypeptide which is an intracellular signaling domain described herein (e.g., comprising a costimulatory domain (e.g., 41BB, CD27, OX40 or CD28, e.g., as described herein) and/or a primary signaling domain (e.g., a CD3 zeta signaling domain described herein). In one embodiment, the agent comprises a first polypeptide of PD-1 or a fragment thereof, and a second polypeptide of an intracellular signaling domain described herein (e.g., a 4-1BB signaling domain described herein and/or a CD3 zeta signaling domain described herein).

[0651] In one aspect, the present invention provides methods comprising administering a population of CAR-expressing cells, e.g., CART cells, e.g., a mixture of cells expressing different CARs, in combination with another agent, e.g., a kinase inhibitor, such as a kinase inhibitor described herein. In another aspect, the present invention provides methods comprising administering a population of cells wherein at least one cell in the population expresses a CAR having an antigen binding domain of a cancer associated antigen described herein, and a second cell expressing another agent, e.g., an agent which enhances the activity of a CAR-expressing cell, in combination with another agent, e.g., a kinase inhibitor, such as a kinase inhibitor described herein.

### Regulatable Chimeric Antigen Receptors

[0652] In some embodiments, a regulatable CAR (RCAR) where the CAR activity can be controlled is desirable to optimize the safety and efficacy of a CAR therapy. In embodiments, a target CAR is an RCAR. There are many ways CAR activities can be regulated. For example, inducible apoptosis using, e.g., a caspase fused to a dimerization domain (see, e.g., Di et al., N Egnl. J. Med. 2011 Nov. 3; 365 (18): 1673-1683), can be used as a safety switch in the CAR therapy of the instant invention. In an aspect, a RCAR comprises a set of polypeptides, typically two in the simplest embodiments, in which the components of a standard CAR described herein, e.g., an antigen binding domain and an intracellular signaling domain, are partitioned on separate polypeptides or members. In some embodiments, the set of polypeptides include a dimerization switch that, upon the presence of a dimerization molecule, can couple the polypeptides to one another, e.g., can couple an antigen binding domain to an intracellular signaling domain.

[0653] In an aspect, an RCAR comprises two polypeptides or members: 1) an intracellular signaling member comprising an intracellular signaling domain, e.g., a primary intracellular signaling domain described herein, and a first switch domain; 2) an antigen binding member comprising an antigen binding domain, e.g., that targets a tumor antigen described herein, as described herein and a second switch domain. Optionally, the RCAR comprises a transmembrane domain described herein. In an embodiment, a transmembrane domain can be disposed on the intracellular signaling member, on the antigen binding member, or on both. (Unless otherwise indicated, when members or elements of an RCAR are described herein, the order can be as provided, but other orders are included as well. In other words, in an embodiment, the order is as set out in the text, but in other embodiments, the order can be different. E.g., the order of elements on one side of a transmembrane region can be different from the example, e.g., the placement of a switch domain relative to a intracellular signaling domain can be different, e.g., reversed).

[0654] In an embodiment, the first and second switch domains can form an intracellular or an extracellular dimerization switch. In an embodiment, the dimerization switch can be a homodimerization switch, e.g., where the first and second switch domain are the same, or a heterodimerization switch, e.g., where the first and second switch domain are different from one another.

[0655] In embodiments, an RCAR can comprise a “multi switch.” A multi switch can comprise heterodimerization switch domains or homodimerization switch domains. A multi switch comprises a plurality of, e.g., 2, 3, 4, 5, 6, 7, 8, 9, or 10, switch domains, independently, on a first member, e.g., an antigen binding member, and a second member, e.g., an intracellular signaling member. In an embodiment, the first member can comprise a plurality of first switch domains, e.g., FKBP-based switch domains, and the second member can comprise a plurality of second switch domains, e.g., FRB-based switch domains. In an embodiment, the first member can comprise a first and a second switch domain, e.g., a FKBP-based switch domain and a FRB-based switch domain, and the second member can comprise a first and a second switch domain, e.g., a FKBP-based switch domain and a FRB-based switch domain.

[0656] In an embodiment, the intracellular signaling member comprises one or more intracellular signaling domains, e.g., a primary intracellular signaling domain and one or more costimulatory signaling domains.

[0657] In an embodiment, the antigen binding member may comprise one or more intracellular signaling domains, e.g., one or more costimulatory signaling domains. In an embodiment, the antigen binding member comprises a plurality, e.g., 2 or 3 costimulatory signaling domains described herein, e.g., selected from 41BB, CD28, CD27, ICOS, and OX40, and in embodiments, no primary intracellular signaling domain. In an embodiment, the antigen binding member comprises the following costimulatory signaling domains, from the extracellular to intracellular direction: 41BB-CD27; 41BB-CD27; CD27-41BB; 41BB-CD28; CD28-41BB; OX40-CD28; CD28-OX40; CD28-41BB; or 41BB-CD28. In such embodiments, the intracellular binding member comprises a CD3zeta domain. In one such embodiment the RCAR comprises (1) an antigen binding member comprising, an antigen binding domain, a transmembrane domain, and two costimulatory domains and a first switch domain; and (2) an intracellular signaling domain comprising a transmembrane domain or membrane tethering domain and at least one primary intracellular signaling domain, and a second switch domain.

[0658] An embodiment provides RCARs wherein the antigen binding member is not tethered to the surface of the CAR cell. This allows a cell having an intracellular signaling member to be conveniently paired with one or more antigen binding domains, without transforming the cell with a sequence that encodes the antigen binding member. In such embodiments, the RCAR comprises: 1) an intracellular signaling member comprising: a first switch domain, a transmembrane domain, an intracellular signaling domain, e.g., a primary intracellular signaling domain, and a first switch domain; and 2) an antigen binding member comprising: an antigen binding domain, and a second switch domain, wherein the antigen binding member does not comprise a transmembrane domain or membrane tethering domain, and, optionally, does not comprise an intracellular signaling domain. In some embodiments, the RCAR may further comprise 3) a second antigen binding member comprising: a second antigen binding domain, e.g., a second antigen binding domain that binds a different antigen than is bound by the antigen binding domain; and a second switch domain.

[0659] Also provided herein are RCARs wherein the antigen binding member comprises bispecific activation and targeting capacity. In this embodiment, the antigen binding member can comprise a plurality, e.g., 2, 3, 4, or 5 antigen binding domains, e.g., scFvs, wherein each antigen binding domain binds to a target antigen, e.g. different antigens or the same antigen, e.g., the same or different epitopes on the same antigen. In an embodiment, the plurality of antigen binding domains are in tandem, and optionally, a linker or hinge region is disposed between each of the antigen binding domains. Suitable linkers and hinge regions are described herein.

[0660] An embodiment provides RCARs having a configuration that allows switching of proliferation. In this embodiment, the RCAR comprises: 1) an intracellular signaling member comprising: optionally, a transmembrane domain or membrane tethering domain; one or more co-stimulatory signaling domain, e.g., selected from 41BB, CD28, CD27, ICOS, and OX40, and a switch domain; and 2) an antigen binding member comprising: an antigen binding domain, a transmembrane domain, and a primary intracellular signaling domain, e.g., a CD3zeta domain, wherein the antigen binding member does not comprise a switch domain, or does not comprise a switch domain that dimerizes with a switch domain on the intracellular signaling member. In an embodiment, the antigen binding member does not comprise a co-stimulatory signaling domain. In an embodiment, the intracellular signaling member comprises a switch domain from a homodimerization switch. In an embodiment, the intracellular signaling member comprises a first switch domain of a heterodimerization switch and the RCAR comprises a second intracellular signaling member which comprises a second switch domain of the heterodimerization switch. In such embodiments, the second intracellular signaling member comprises the same intracellular signaling domains as the intracellular signaling member. In an embodiment, the dimerization switch is intracellular. In an embodiment, the dimerization switch is extracellular.

[0661] In any of the RCAR configurations described here, the first and second switch domains comprise a FKBP-FRB based switch as described herein.

[0662] Also provided herein are cells comprising an RCAR described herein. Any cell that is engineered to express a RCAR can be used as a RCARX cell. In an embodiment the RCARX cell is a T cell, and is referred to as a RCART cell. In an embodiment the RCARX cell is an NK cell, and is referred to as a RCARN cell.

[0663] Also provided herein are nucleic acids and vectors comprising RCAR encoding sequences. Sequence encoding various elements of an RCAR can be disposed on the same nucleic acid molecule, e.g., the same plasmid or vector, e.g., viral vector, e.g., lentiviral vector. In an embodiment, (i) sequence encoding an antigen binding member and (ii) sequence encoding an intracellular signaling member, can be present on the same nucleic acid, e.g., vector. Production of the corresponding proteins can be achieved, e.g., by the use of separate promoters, or by the use of a bicistronic transcription product (which can result in the production of two proteins by cleavage of a single translation product or by the translation of two separate protein products). In an embodiment, a sequence encoding a cleavable peptide, e.g., a P2A or F2A sequence, is disposed between (i) and (ii). In an embodiment, a sequence encoding an IRES, e.g., an EMCV or EV71 IRES, is disposed between (i) and (ii). In these embodiments, (i) and (ii) are transcribed as a single RNA. In an embodiment, a first promoter is operably linked to (i) and a second promoter is operably linked to (ii), such that (i) and (ii) are transcribed as separate mRNAs.

[0664] Alternatively, the sequence encoding various elements of an RCAR can be disposed on the different nucleic acid molecules, e.g., different plasmids or vectors, e.g., viral vector, e.g., lentiviral vector. E.g., the (i) sequence encoding an antigen binding member can be present on a first nucleic acid, e.g., a first vector, and the (ii) sequence encoding an intracellular signaling member can be present on the second nucleic acid, e.g., the second vector.

### Dimerization Switches

[0665] Dimerization switches can be non-covalent or covalent. In a non-covalent dimerization switch, the dimerization molecule promotes a non-covalent interaction between the switch domains. In a covalent dimerization switch, the dimerization molecule promotes a covalent interaction between the switch domains.

[0666] In an embodiment, the RCAR comprises a FKBP/FRAP, or FKBP/FRB-based dimerization switch. FKBP12 (FKBP, or FK506 binding protein) is an abundant cytoplasmic protein that serves as the initial intracellular target for the natural product immunosuppressive drug, rapamycin. Rapamycin binds to FKBP and to the large PI3K homolog FRAP (RAFT, mTOR). FRB is a 93 amino acid portion of FRAP, that is sufficient for binding the FKBP-rapamycin complex (Chen, J., Zheng, X. F., Brown, E. J. & Schreiber, S. L. (1995) Identification of an 11-kDa FKBP12-rapamycin-binding domain within the 289-kDa FKBP12-rapamycin-associated protein and characterization of a critical serine residue. Proc Natl Acad Sci USA 92:4947-51.)

[0667] In embodiments, an FKBP/FRAP, e.g., an FKBP/FRB, based switch can use a dimerization molecule, e.g., rapamycin or a rapamycin analog.

[0668] The amino acid sequence of FKBP is as follows:

(SEQ ID NO: 52)
D V P D Y A S L G G P S S P K K K R K V S R G V Q
V E T I S P G D G R T F P K R G Q T C V V H Y T G
M L E D G K K F D S S R D R N K P F K F M L G K Q
E V I R G W E E G V A Q M S V G Q R A K L T I S P
D Y A Y G A T G H P G I I P P H A T L V F D V E L
L K L E T S Y

[0669] In embodiments, an FKBP switch domain can comprise a fragment of FKBP having the ability to bind with FRB, or a fragment or analog thereof, in the presence of rapamycin or a rapalog, e.g., the underlined portion of SEQ ID NO: 52, which is:

(SEQ ID NO: 53)
V Q V E T I S P G D G R T F P K R G Q T C V V H Y
T G M L E D G K K F D S S R D R N K P F K F M L G
K Q E V I R G W E E G V A Q M S V G Q R A K L T I
S P D Y A Y G A T G H P G I I P P H A T L V F D V
E L L K L E T S

[0670] The amino acid sequence of FRB is as follows:

(SEQ ID NO: 54)
[sequence omitted]

[0671] “FKBP/FRAP, e.g., an FKBP/FRB, based switch” as that term is used herein, refers to a dimerization switch comprising: a first switch domain, which comprises an FKBP fragment or analog thereof having the ability to bind with FRB, or a fragment or analog thereof, in the presence of rapamycin or a rapalog, e.g., RAD001, and has at least 70, 75, 80, 85, 90, 95, 96, 97, 98, or 99% identity with, or differs by no more than 30, 25, 20, 15, 10, 5, 4, 3, 2, or 1 amino acid residues from, the FKBP sequence of SEQ ID NO: 52 or 53; and a second switch domain, which comprises an FRB fragment or analog thereof having the ability to bind with FRB, or a fragment or analog thereof, in the presence of rapamycin or a rapalog, and has at least 70, 75, 80, 85, 90, 95, 96, 97, 98, or 99% identity with, or differs by no more than 30, 25, 20, 15, 10, 5, 4, 3, 2, or 1 amino acid residues from, the FRB sequence of SEQ ID NO: 54. In an embodiment, a RCAR described herein comprises one switch domain comprises amino acid residues disclosed in SEQ ID NO: 52 (or SEQ ID NO: 53), and one switch domain comprises amino acid residues disclosed in SEQ ID NO: 54.

[0672] In embodiments, the FKBP/FRB dimerization switch comprises a modified FRB switch domain that exhibits altered, e.g., enhanced, complex formation between an FRB-based switch domain, e.g., the modified FRB switch domain, a FKBP-based switch domain, and the dimerization molecule, e.g., rapamycin or a rapalogue, e.g., RAD001. In an embodiment, the modified FRB switch domain comprises one or more mutations, e.g., 2, 3, 4, 5, 6, 7, 8, 9, 10 or more, selected from mutations at amino acid position(s) L2031, E2032, S2035, R2036, F2039, G2040, T2098, W2101, D2102, Y2105, and F2108, where the wild-type amino acid is mutated to any other naturally-occurring amino acid. In an embodiment, a mutant FRB comprises a mutation at E2032, where E2032 is mutated to phenylalanine (E2032F), methionine (E2032M), arginine (E2032R), valine (E2032V), tyrosine (E2032Y), isoleucine (E2032I), e.g., SEQ ID NO: 55, or leucine (E2032L), e.g., SEQ ID NO: 56. In an embodiment, a mutant FRB comprises a mutation at T2098, where T2098 is mutated to phenylalanine (T2098F) or leucine (T2098L), e.g., SEQ ID NO: 57. In an embodiment, a mutant FRB comprises a mutation at E2032 and at T2098, where E2032 is mutated to any amino acid, and where T2098 is mutated to any amino acid, e.g., SEQ ID NO: 58. In an embodiment, a mutant FRB comprises an E2032I and a T2098L mutation, e.g., SEQ ID NO: 59. In an embodiment, a mutant FRB comprises an E2032L and a T2098L mutation, e.g., SEQ ID NO: 60.

TABLE 2
Exemplary mutant FRB having increased
affinity for a dimerization molecule.

| | | SEQ |
|---|---|---|
| FRB | | ID |
| mutant | Amino Acid Sequence | NO: |
| E2032I | ILWHEMWHEGLIEASRLYFGERNVKG | 55 |
| mutant | MFEVLEPLHAMMERGPQTLKETSFNQ | |
| | AYGRDLMEAQEWCRKYMKSGNVKDLT | |
| | QAWDLYYHVFRRISKTS | |
| E2032L | ILWHEMWHEGLLEASRLYFGERNVKG | 56 |
| mutant | MFEVLEPLHAMMERGPQTLKETSFNQ | |
| | AYGRDLMEAQEWCRKYMKSGNVKDLT | |
| | QAWDLYYHVFRRISKTS | |
| T2098L | ILWHEMWHEGLEEASRLYFGERNVKG | 57 |
| mutant | MFEVLEPLHAMMERGPQTLKETSFNQ | |
| | AYGRDLMEAQEWCRKYMKSGNVKDLL | |
| | QAWDLYYHVFRRISKTS | |
| E2032, | ILWHEMWHEGLXEASRLYFGERNVKG | 58 |
| T2098 | MFEVLEPLHAMMERGPQTLKETSFNQ | |
| mutant | AYGRDLMEAQEWCRKYMKSGNVKDLX | |
| | QAWDLYYHVFRRISKTS | |
| E20321, | ILWHEMWHEGLIEASRLYFGERNVKG | 59 |
| T2098L | MFEVLEPLHAMMERGPQTLKETSFNQ | |
| mutant | AYGRDLMEAQEWCRKYMKSGNVKDLL | |
| | QAWDLYYHVFRRISKTS | |
| E2032L, | ILWHEMWHEGLLEASRLYFGERNVKG | 60 |
| T2098L | MFEVLEPLHAMMERGPQTLKETSFNQ | |
| mutant | AYGRDLMEAQEWCRKYMKSGNVKDLL | |
| | QAWDLYYHVFRRISKTS | |

[0673] Other suitable dimerization switches include a GyrB-GyrB based dimerization switch, a Gibberellin-based dimerization switch, a tag/binder dimerization switch, and a halo-tag/snap-tag dimerization switch. Following the guidance provided herein, such switches and relevant dimerization molecules will be apparent to one of ordinary skill.

### Dimerization Molecule

[0674] Association between the switch domains is promoted by the dimerization molecule. In the presence of dimerization molecule interaction or association between switch domains allows for signal transduction between a polypeptide associated with, e.g., fused to, a first switch domain, and a polypeptide associated with, e.g., fused to, a second switch domain. In the presence of non-limiting levels of dimerization molecule signal transduction is increased by 1.1, 1.2, 1.3, 1.4, 1.5, 1.6, 1.7, 1.8, 1.9, 2, 5, 10, 50, 100 fold, e.g., as measured in a system described herein.

[0675] Rapamycin and rapamycin analogs (sometimes referred to as rapalogues), e.g., RAD001, can be used as dimerization molecules in a FKBP/FRB-based dimerization switch described herein. In an embodiment the dimerization molecule can be selected from rapamycin (sirolimus), RAD001 (everolimus), zotarolimus, temsirolimus, AP-23573 (ridaforolimus), biolimus and AP21967. Additional rapamycin analogs suitable for use with FKBP/FRB-based dimerization switches are further described in the section entitled “Combination Therapies”, or in the subsection entitled “Exemplary mTOR inhibitors”.

### Split CAR

[0676] In some embodiments, the CAR-expressing cell (e.g., target CAR or anti-target CAR) uses a split CAR. The split CAR approach is described in more detail in publications WO2014/055442 and WO2014/055657. Briefly, a split CAR system comprises a cell expressing a first CAR having a first antigen binding domain and a costimulatory domain (e.g., 41BB), and the cell also expresses a second CAR having a second antigen binding domain and an intracellular signaling domain (e.g., CD3 zeta). When the cell encounters the first antigen, the costimulatory domain is activated, and the cell proliferates. When the cell encounters the second antigen, the intracellular signaling domain is activated and cell-killing activity begins. Thus, the CAR-expressing cell is only fully activated in the presence of both antigens.

### Exemplary CAR Molecules

[0677] The CAR molecules disclosed herein can comprise a binding domain that binds to a target, e.g., a target as described herein; a transmembrane domain, e.g., a transmembrane domain as described herein; and an intracellular signaling domain, e.g., an intracellular domain as described herein. In embodiments, the binding domain comprises a heavy chain complementary determining region 1 (HC CDR1), a heavy chain complementary determining region 2 (HC CDR2), and a heavy chain complementary determining region 3 (HC CDR3) of a heavy chain binding domain described herein, and/or a light chain complementary determining region 1 (LC CDR1), a light chain complementary determining region 2 (LC CDR2), and a light chain complementary determining region 3 (LC CDR3) of a light chain binding domain described herein.

### CD19 CAR

[0678] In other embodiments, the CAR molecule comprises a CD19 CAR molecule described herein, e.g., a CD19 CAR molecule described in US-2015-0283178-A1, e.g., CTL019. In embodiments, the CD19 CAR comprises an amino acid, or has a nucleotide sequence shown in US-2015-0283178-A1, incorporated herein by reference, or a sequence substantially identical thereto (e.g., at least 85%, 90%, 95% or more identical thereto).

[0679] In one embodiment, the CAR T cell that specifically binds to CD19 has the USAN designation TISAGENLECLEUCEL-T. CTL019 is made by a gene modification of T cells is mediated by stable insertion via transduction with a self-inactivating, replication deficient Lentiviral (LV) vector containing the CTL019 transgene under the control of the EF-1 alpha promoter. CTL019 can be a mixture of transgene positive and negative T cells that are delivered to the subject on the basis of percent transgene positive T cells.

[0680] In other embodiments, the CD19 CAR includes a CAR molecule, or an antigen binding domain (e.g., a humanized antigen binding domain) according to Table 3 of WO2014/153270, incorporated herein by reference. The amino acid and nucleotide sequences encoding the CD19 CAR molecules and antigen binding domains (e.g., including one, two, three VH CDRs; and one, two, three VL CDRs according to Kabat or Chothia), are specified in WO2014/153270. In embodiments, the CD19 CAR comprises an amino acid, or has a nucleotide sequence shown in WO2014/153270 incorporated herein by reference, or a sequence substantially identical to any of the aforesaid sequences (e.g., at least 85%, 90%, 95% or more identical to any of the aforesaid CD19 CAR sequences).

[0681] In one embodiment, the parental murine scFv sequence is the CAR19 construct provided in PCT publication WO2012/079000 (incorporated herein by reference) and provided herein in Table 3. In one embodiment, the anti-CD19 binding domain is a scFv described in WO2012/079000 and provided herein in Table 3.

[0682] In one embodiment, the CD19 CAR comprises an amino acid sequence provided as SEQ ID NO: 12 in PCT publication WO2012/079000. In embodiment, the amino acid sequence is:

[0683] MALPVTALLLPLALLLHAARPdiqmtqttsslsaslgdrvtiscrasqdiskylnwyqqkpdgtvklli yhtsrlhsgvpsrfsgsgsgtdysltisnleqediatyfcqqgntlpytfgggtkleitggggsggggsggggsevklqesgpglva psqslsvtctvsgvslpdygvswirqpprkglewlgviwgsettyynsalksrltiikdnsksqvflkmnslqtddtaiyycakh yyyggsyamdywgqgtsvtvsstttpaprpptpaptiasqplslrpeacrpaaggavhtrgldfacdiyiwaplagtcgvlllslv itlyckrgrkkllyifkqpfmrpvqttqeedgescrfpeeeeggcelrvkfsrsadapaykqgqnqlynelnlgrreeydvldkrr grdpemggkprrknpqeglynelqkdkmaeayseigmkgerrrgkghdglyqglstatkdtydalhmqalppr (SEQ ID NO: 891), or a sequence substantially identical thereto (e.g., at least 85%, 90% or 95% or higher identical thereto), with or without the signal peptide sequence indicated in capital letters.

[0684] In embodiment, the amino acid sequence is:

[0685] diqmtqttsslsaslgdrvtiscrasqdiskylnwyqqkpdgtvklliyhtsrlhsgvpsrfsgsgsgtdysltisnleqe diatyfcqqgntlpytfgggtkleitggggsggggsggggsevklqesgpglvapsqslsvtctvsgvslpdygvswirqpprkg lewlgviwgsettyynsalksrltiikdnsksqvflkmnslqtddtaiyycakhyyyggsyamdywgqgtsvtvsstttpaprp ptpaptiasqplslrpeacrpaaggavhtrgldfacdiyiwaplagtcgvlllslvitlyckrgrkkllyifkqpfmrpvqttqeedg cscrfpeeeeggcelrvkfsrsadapaykqgqnqlynelnlgrreeydvldkrrgrdpemggkprrknpqeglynelqkdkm aeayseigmkgerrrgkghdglyqglstatkdtydalhmqalppr (SEQ ID NO: 892), or a sequence substantially homologous thereto (e.g., at least 85%, 90% or 95% or higher identical thereto).

[0686] In embodiments, the CAR molecule is a CD19 CAR molecule described herein, e.g., a humanized CAR molecule described herein, e.g., a humanized CD19 CAR molecule of Table 3 or having CDRs as set out in Tables 4A and 4B.

[0687] In embodiments, the CAR molecule is a CD19 CAR molecule described herein, e.g., a murine CAR molecule described herein, e.g., a murine CD19 CAR molecule of Table 3 or having CDRs as set out in Tables 4A and 4B.

[0688] In some embodiments, the CAR molecule comprises one, two, and/or three CDRs from the heavy chain variable region and/or one, two, and/or three CDRs from the light chain variable region of the murine or humanized CD19 CAR of Tables 4A and 4B.

[0689] In one embodiment, the antigen binding domain comprises one, two three (e.g., all three) heavy chain CDRs, HC CDR1, HC CDR2 and HC CDR3, from an antibody listed herein, and/or one, two, three (e.g., all three) light chain CDRs, LC CDR1, LC CDR2 and LC CDR3, from an antibody listed herein. In one embodiment, the antigen binding domain comprises a heavy chain variable region and/or a variable light chain region of an antibody listed or described herein.

[0690] Exemplary CD19 CARs include any of the CD19 CARs or anti-CD19 binding domains described herein, e.g., in one or more tables (e.g., Table 3) described herein (e.g., or an anti-CD19 CAR described in Xu et al. Blood 123.24 (2014): 3750-9; Kochenderfer et al. Blood 122.25 (2013): 4129-39, Cruz et al. Blood 122.17 (2013): 2965-73, NCT00586391, NCT01087294, NCT02456350, NCT00840853, NCT02659943, NCT02650999, NCT02640209, NCT01747486, NCT02546739, NCT02656147, NCT02772198, NCT00709033, NCT02081937, NCT00924326, NCT02735083, NCT02794246, NCT02746952, NCT01593696, NCT02134262, NCT01853631, NCT02443831, NCT02277522, NCT02348216, NCT02614066, NCT02030834, NCT02624258, NCT02625480, NCT02030847, NCT02644655, NCT02349698, NCT02813837, NCT02050347, NCT01683279, NCT02529813, NCT02537977, NCT02799550, NCT02672501, NCT02819583, NCT02028455, NCT01840566, NCT01318317, NCT01864889, NCT02706405, NCT01475058, NCT01430390, NCT02146924, NCT02051257, NCT02431988, NCT01815749, NCT02153580, NCT01865617, NCT02208362, NCT02685670, NCT02535364, NCT02631044, NCT02728882, NCT02735291, NCT01860937, NCT02822326, NCT02737085, NCT02465983, NCT02132624, NCT02782351, NCT01493453, NCT02652910, NCT02247609, NCT01029366, NCT01626495, NCT02721407, NCT01044069, NCT00422383, NCT01680991, NCT02794961, or NCT02456207, each of which is incorporated herein by reference in its entirety.

[0691] Exemplary CD19 CAR and antigen binding domain constructs that can be used in the methods described herein are shown in Table 3. The light and heavy chain CDR sequences according to Kabat are shown by the bold and underlined text, and are also summarized in Tables 3 and 4A-4B below. The location of the signal sequence and histidine tag are also underlined. In embodiments, the CD19 CAR sequences and antigen binding fragments thereof do not include the signal sequence and/or histidine tag sequences.

[0692] In embodiments, the CD19 CAR comprises an anti-CD19 binding domain (e.g., murine or humanized anti-CD19 binding domain), a transmembrane domain, and an intracellular signaling domain, and wherein said anti-CD19 binding domain comprises a heavy chain complementary determining region 1 (HC CDR1), a heavy chain complementary determining region 2 (HC CDR2), and a heavy chain complementary determining region 3 (HC CDR3) of any anti-CD19 heavy chain binding domain amino acid sequences listed in Table 3 and 4A-4B, or a sequence at least 85%, 90%, 95% or more identical thereto (e.g., having less than 5, 4, 3, 2 or 1 amino acid substitutions, e.g., conservative substitutions).

[0693] In one embodiment, the anti-CD19 binding domain comprises a light chain variable region described herein (e.g., in Table 3) and/or a heavy chain variable region described herein (e.g., in Table 3), or a sequence at least 85%, 90%, 95% or more identical thereto.

[0694] In one embodiment, the encoded anti-CD19 binding domain is a scFv comprising a light chain and a heavy chain of an amino acid sequence of Tables 3, or a sequence at least 85%, 90%, 95% or more identical thereto.

[0695] In an embodiment, the human or humanized anti-CD19 binding domain (e.g., an scFv) comprises: a light chain variable region comprising an amino acid sequence having at least one, two or three modifications (e.g., substitutions, e.g., conservative substitutions) but not more than 30, 20 or 10 modifications (e.g., substitutions, e.g., conservative substitutions) of an amino acid sequence of a light chain variable region provided in Table 3, or a sequence at least 85%, 90%, 95% or more identical thereto; and/or a heavy chain variable region comprising an amino acid sequence having at least one, two or three modifications (e.g., substitutions, e.g., conservative substitutions) but not more than 30, 20 or 10 modifications (e.g., substitutions, e.g., conservative substitutions) of an amino acid sequence of a heavy chain variable region provided in Table 3, or a sequence at least 85%, 90%, 95% or more identical thereto.

TABLE 3
CD19 CAR Constructs

| | | |
|---|---|---|
| | SEQ ID | |
| Name | NO: | Sequence |

CAR 1

| | | |
|---|---|---|
| CAR 1 scFv | 893 | EIVMTQSPATLSLSPGERATLSCRASQDISKYLNWYQQKPGQAPRLLIYHTSRLH |
| domain | | SGIPARFSGSGSGTDYTLTISSLQPEDFAVYFCQQGNTLPYTFGQGTKLEIKGGG |
| | | GSGGGGSGGGGSQVQLQESGPGLVKPSETLSLTCTVSGVSLPDYGVSWIRQPPGK |
| | | GLEWIGVIWGSETTYYSSSLKSRVTISKDNSKNQVSLKLSSVTAADTAVYYCAKH |
| | | YYYGGSYAMDYWGQGTLVTVSS |
| 103101 | 894 | atggccctccctgtcaccgccctgctgcttccgctggctcttctgctccacgccg |
| CAR 1 | | ctcggcccgaaattgtgatgacccagtcacccgccactcttagcctttcacccgg |
| Soluble | | tgagcgcgcaaccctgtcttgcagagcctcccaagacatctcaaaataccttaat |
| scFv - nt | | tggtatcaacagaagcccggacaggctcctcgccttctgatctaccacaccagcc |
| | | ggctccattctggaatccctgccaggttcagcggtagcggatctgggaccgacta |
| | | caccctcactatcagctcactgcagccagaggacttcgctgtctatttctgtcag |
| | | caagggaacaccctgccctacacctttggacagggcaccaagctcgagattaaag |
| | | gtggaggtggcagcggaggaggtgggtccggcggtggaggaagccaggtccaact |
| | | ccaagaaagcggaccgggtcttgtgaagccatcagaaactctttcactgacttgt |
| | | actgtgagcggagtgtctctccccgattacggggtgtcttggatcagacagccac |
| | | cggggaagggtctggaatggattggagtgatttggggctctgagactacttacta |
| | | ctcttcatccctcaagtcacgcgtcaccatctcaaaggacaactctaagaatcag |
| | | gtgtcactgaaactgtcatctgtgaccgcagccgacaccgccgtgtactattgcg |
| | | ctaagcattactattatggcgggagctacgcaatggattactggggacagggtac |
| | | tctggtcaccgtgtccagccaccaccatcatcaccatcaccat |
| 103101 | 895 | MALPVTALLLPLALLLHAARPeivmtqspatlslspgeratlscrasgdiskyln |
| CAR 1 | | wyggkpggaprlliyhtsrlhsgiparfsgsgsgtdytltisslgpedfavyfcq |
| Soluble | | qgntlpytfgqgtkleikggggsggggsggggsqvqlqesgpglvkpsetlsltc |
| scFv - aa | | tvsgyslpdygvswirqppgkglewigviwgsettyyssslksrvtiskdnsknq |
| | | vslklssvtaadtavyycakhyyyggsyamdywgqgtlvtvsshhhhhhhh |
| 104875 | 896 | atggccctccctgtcaccgccctgctgcttccgctggctcttctgctccacgccg |
| CAR 1 - | | ctcggcccgaaattgtgatgacccagtcacccgccactcttagcctttcacccgg |
| Full - nt | | tgagcgcgcaaccctgtcttgcagagcctcccaagacatctcaaaataccttaat |
| | | tggtatcaacagaagcccggacaggctcctcgccttctgatctaccacaccagcc |
| | | ggctccattctggaatccctgccaggttcagcggtagcggatctgggaccgacta |
| | | caccctcactatcagctcactgcagccagaggacttcgctgtctatttctgtcag |
| | | caagggaacaccctgccctacacctttggacagggcaccaagctcgagattaaag |
| | | gtggaggtggcagcggaggaggtgggtccggcggtggaggaagccaggtccaact |
| | | ccaagaaagcggaccgggtcttgtgaagccatcagaaactctttcactgacttgt |
| | | actgtgagcggagtgtctctccccgattacggggtgtcttggatcagacagccac |
| | | cggggaagggtctggaatggattggagtgatttggggctctgagactacttacta |
| | | ctcttcatccctcaagtcacgcgtcaccatctcaaaggacaactctaagaatcag |
| | | gtgtcactgaaactgtcatctgtgaccgcagccgacaccgccgtgtactattgcg |
| | | ctaagcattactattatggcgggagctacgcaatggattactggggacagggtac |
| | | tctggtcaccgtgtccagcaccactaccccagcaccgaggccacccaccccggct |
| | | cctaccatcgcctcccagcctctgtccctgcgtccggaggcatgtagacccgcag |
| | | ctggtggggccgtgcatacccggggtcttgacttcgcctgcgatatctacatttg |
| | | ggcccctctggctggtacttgcggggtcctgctgctttcactcgtgatcactctt |
| | | tactgtaagcgcggtcggaagaagctgctgtacatctttaagcaacccttcatga |
| | | ggcctgtgcagactactcaagaggaggacggctgttcatgccggttcccagagga |
| | | ggaggaaggcggctgcgaactgcgcgtgaaattcagccgcagcgcagatgctcca |
| | | gcctacaagcaggggcagaaccagctctacaacgaactcaatcttggtcggagag |
| | | aggagtacgacgtgctggacaagcggagaggacgggacccagaaatgggcgggaa |
| | | gccgcgcagaaagaatccccaagagggcctgtacaacgagctccaaaaggataag |
| | | atggcagaagcctatagcgagattggtatgaaaggggaacgcagaagaggcaaag |
| | | gccacgacggactgtaccagggactcagcaccgccaccaaggacacctatgacgc |
| | | tcttcacatgcaggccctgccgcctcgg |
| 104875 | 897 | MALPVTALLLPLALLLHAARPeivmtqspatlslspgeratlscrasqdiskyln |
| CAR 1 - | | wyqqkpgqaprlliyhtsrlhsgiparfsgsgsgtdytltisslqpedfavyfcq |
| Full - aa | | qgntlpytfgqgtkleikggggsggggsggggsqvqlqesgpglvkpsetlsltc |
| | | tvsgvslpdygvswirqppgkglewigviwgsettyyssslksrvtiskdnsknq |
| | | vslklssvtaadtavyycakhyyyggsyamdywgqgtlvtvsstttpaprpptpa |
| | | ptiasgplslrpeacrpaaggavhtrgldfacdiyiwaplagtcgvlllslvitl |
| | | yckrgrkkllyifkgpfmrpvgttqeedgcscrfpeeeeggcelrvkfsrsadap |
| | | aykgggnglynelnlgrreeydvldkrrgrdpemggkprrknpqeglynelqkdk |
| | | maeayseigmkgerrrgkghdglygglstatkdtydalhmqalppr |

CAR 2

| | | |
|---|---|---|
| CAR 2 scFv | 898 | eivmtqspatlslspgeratlscrasqdiskylnwyqqkpgqaprlliyhtsrlh |
| domain | | sgiparfsgsgsgtdytltisslgpedfavyfcqqgntlpytfgqgtkleikggg |
| | | gsggggsggggsqvqlqesgpglvkpsetlsltctvsgvslpdygyswirgppgk |
| | | giewigviwgsettyygsslksrvtiskdnsknqvslklssvtaadtavyycakh |
| | | yyyggsyamdywgggtlvtvss |
| 103102 | 899 | atggccctccctgtcaccgccctgctgcttccgctggctcttctgctccacgccg |
| CAR 2 - | | ctcggcccgaaattgtgatgacccagtcacccgccactcttagcctttcacccgg |
| Soluble | | tgagcgcgcaaccctgtcttgcagagcctcccaagacatctcaaaataccttaat |
| scFv - nt | | tggtatcaacagaagcccggacaggctcctcgccttctgatctaccacaccagcc |
| | | ggctccattctggaatccctgccaggttcagcggtagcggatctgggaccgacta |
| | | caccctcactatcagctcactgcagccagaggacttcgctgtctatttctgtcag |
| | | caagggaacaccctgccctacacctttggacagggcaccaagctcgagattaaag |
| | | gtggaggtggcagcggaggaggtgggtccggcggtggaggaagccaggtccaact |
| | | ccaagaaagcggaccgggtcttgtgaagccatcagaaactctttcactgacttgt |
| | | actgtgagcggagtgtctctccccgattacggggtgtcttggatcagacagccac |
| | | cggggaagggtctggaatggattggagtgatttggggctctgagactacttacta |
| | | ccaatcatccctcaagtcacgcgtcaccatctcaaaggacaactctaagaatcag |
| | | gtgtcactgaaactgtcatctgtgaccgcagccgacaccgccgtgtactattgcg |
| | | ctaagcattactattatggcgggagctacgcaatggattactggggacagggtac |
| | | tctggtcaccgtgtccagccaccaccatcatcaccatcaccat |
| 103102 | 900 | MALPVTALLLPLALLLHAARPeivmtqspatlslspgeratlscrasqdiskyln |
| CAR 2 - | | wyggkpggaprlliyhtsrlhsgiparfsgsgsgtdytltisslgpedfavyfcq |
| Soluble | | ggntlpytfgqgtkleikggggsggggsggggsqvqlqesgpglvkpsetlsltc |
| scFv - aa | | tvsgvslpdygvswirqppgkglewigviwgsettyygsslksrvtiskdnsknq |
| | | vslklssvtaadtavyycakhyyyggsyamdywgqgtlvtvsshhhhhhhh |
| 104876 | 901 | atggccctccctgtcaccgccctgctgcttccgctggctcttctgctccacgccg |
| CAR 2 - | | ctcggcccgaaattgtgatgacccagtcacccgccactcttagcctttcacccgg |
| Full - nt | | tgagcgcgcaaccctgtcttgcagagcctcccaagacatctcaaaataccttaat |
| | | tggtatcaacagaagcccggacaggctcctcgccttctgatctaccacaccagcc |
| | | ggctccattctggaatccctgccaggttcagcggtagcggatctgggaccgacta |
| | | caccctcactatcagctcactgcagccagaggacttcgctgtctatttctgtcag |
| | | caagggaacaccctgccctacacctttggacagggcaccaagctcgagattaaag |
| | | gtggaggtggcagcggaggaggtgggtccggcggtggaggaagccaggtccaact |
| | | ccaagaaagcggaccgggtcttgtgaagccatcagaaactctttcactgacttgt |
| | | actgtgagcggagtgtctctccccgattacggggtgtcttggatcagacagccac |
| | | cggggaagggtctggaatggattggagtgatttggggctctgagactacttacta |
| | | ccaatcatccctcaagtcacgcgtcaccatctcaaaggacaactctaagaatcag |
| | | gtgtcactgaaactgtcatctgtgaccgcagccgacaccgccgtgtactattgcg |
| | | ctaagcattactattatggcgggagctacgcaatggattactggggacagggtac |
| | | tctggtcaccgtgtccagcaccactaccccagcaccgaggccacccaccccggct |
| | | cctaccatcgcctcccagcctctgtccctgcgtccggaggcatgtagacccgcag |
| | | ctggtggggccgtgcatacccggggtcttgacttcgcctgcgatatctacatttg |
| | | ggcccctctggctggtacttgcggggtcctgctgctttcactcgtgatcactctt |
| | | tactgtaagcgcggtcggaagaagctgctgtacatctttaagcaacccttcatga |
| | | ggcctgtgcagactactcaagaggaggacggctgttcatgccggttcccagagga |
| | | ggaggaaggcggctgcgaactgcgcgtgaaattcagccgcagcgcagatgctcca |
| | | gcctacaagcaggggcagaaccagctctacaacgaactcaatcttggtcggagag |
| | | aggagtacgacgtgctggacaagcggagaggacgggacccagaaatgggcgggaa |
| | | gccgcgcagaaagaatccccaagagggcctgtacaacgagctccaaaaggataag |
| | | atggcagaagcctatagcgagattggtatgaaaggggaacgcagaagaggcaaag |
| | | gccacgacggactgtaccagggactcagcaccgccaccaaggacacctatgacgc |
| | | tcttcacatgcaggccctgccgcctcgg |
| 104876 | 902 | MALPVTALLLPLALLLHAARPeivmtqspatlslspgeratlscrasqdiskyln |
| CAR 2 - | | wyqqkpgqaprlliyhtsrlhsgiparfsgsgsgtdytltisslqpedfavyfcq |
| Full - aa | | qgntlpytfgqgtkleikggggsggggsggggsqvqlqesgpglvkpsetlsltc |
| | | tvsgvslpdygvswirqppgkglewigviwgsettyyqsslksrvtiskdnsknq |
| | | vslklssvtaadtavyycakhyyyggsyamdywgqgtlvtvsstttpaprpptpa |
| | | ptiasqplslrpeacrpaaggavhtrgldfacdiylwaplagtcgvlllslvitl |
| | | yckrgrkkllyifkqpfmrpvqttqeedgcscrfpeeeeggcelrykfsrsadap |
| | | aykqgqnqlynelnlgrreeydvldkrrgrdpemggkprrknpqeglynelqkdk |
| | | [sequence omitted] |

CAR 3

| | | |
|---|---|---|
| CAR 3 scFV | 903 | qvqlqesgpglvkpsetlsltctvsgvslpdygyswirqppgkglewigviwgse |
| domain | | ttyyssslksrvtiskdnsknqvslklssvtaadtavyycakhyyyggsyamdyw |
| | | gqgtlvtvssggggsggggsggggseivmtqspatlslspgeratlscrasqdis |
| | | kylnwyqqkpgqaprlliyhtsrlhsgiparfsgsgsgtdytltisslqpedfav |
| | | yfcqqgntlpytfgqgtkleik |
| 103104 | 904 | atggctctgcccgtgaccgcactcctcctgccactggctctgctgcttcacgccg |
| CAR 3 - | | ctcgcccacaagtccagcttcaagaatcagggcctggtctggtgaagccatctga |
| Soluble | | gactctgtccctcacttgcaccgtgagcggagtgtccctcccagactacggagtg |
| scFv - nt | | agctggattagacagcctcccggaaagggactggagtggatcggagtgatttggg |
| | | gtagcgaaaccacttactattcatcttccctgaagtcacgggtcaccatttcaaa |
| | | ggataactcaaagaatcaagtgagcctcaagctctcatcagtcaccgccgctgac |
| | | accgccgtgtattactgtgccaagcattactactatggagggtcctacgccatgg |
| | | actactggggccagggaactctggtcactgtgtcatctggtggaggaggtagcgg |
| | | aggaggcgggagcggtggaggtggctccgaaatcgtgatgacccagagccctgca |
| | | accctgtccctttctcccggggaacgggctaccctttcttgtcgggcatcacaag |
| | | atatctcaaaatacctcaattggtatcaacagaagccgggacaggcccctaggct |
| | | tcttatctaccacacctctcgcctgcatagcgggattcccgcacgctttagcggg |
| | | tctggaagcgggaccgactacactctgaccatctcatctctccagcccgaggact |
| | | tcgccgtctacttctgccagcagggtaacaccctgccgtacaccttcggccaggg |
| | | caccaagcttgagatcaaacatcaccaccatcatcaccatcac |
| 103104 | 905 | MALPVTALLLPLALLLHAARPqvqlqesgpglvkpsetlsltctvsgvslpdygv |
| CAR 3 - | | swirgppgkglewigviwgsettyyssslksrvtiskdnsknqvslklssvtaad |
| Soluble | | tavyycakhyyyggsyamdywgggtlvtvssggggsggggsggggseivmtgspa |
| scFv - aa | | tlslspgeratlscrasgdiskylnwyggkpggaprlliyhtsrlhsgiparfsg |
| | | sgsgtdytltissigpedfavyfcqqgntlpytfgqgtkleikhhhhhhhh |
| 104877 | 906 | atggctctgcccgtgaccgcactcctcctgccactggctctgctgcttcacgccg |
| CAR 3 - | | ctcgcccacaagtccagcttcaagaatcagggcctggtctggtgaagccatctga |
| Full - nt | | gactctgtccctcacttgcaccgtgagcggagtgtccctcccagactacggagtg |
| | | agctggattagacagcctcccggaaagggactggagtggatcggagtgatttggg |
| | | gtagcgaaaccacttactattcatcttccctgaagtcacgggtcaccatttcaaa |
| | | ggataactcaaagaatcaagtgagcctcaagctctcatcagtcaccgccgctgac |
| | | accgccgtgtattactgtgccaagcattactactatggagggtcctacgccatgg |
| | | actactggggccagggaactctggtcactgtgtcatctggtggaggaggtagcgg |
| | | aggaggcgggagcggtggaggtggctccgaaatcgtgatgacccagagccctgca |
| | | accctgtccctttctcccggggaacgggctaccctttcttgtcgggcatcacaag |
| | | atatctcaaaatacctcaattggtatcaacagaagccgggacaggcccctaggct |
| | | tcttatctaccacacctctcgcctgcatagcgggattcccgcacgctttagcggg |
| | | tctggaagcgggaccgactacactctgaccatctcatctctccagcccgaggact |
| | | tcgccgtctacttctgccagcagggtaacaccctgccgtacaccttcggccaggg |
| | | caccaagcttgagatcaaaaccactactcccgctccaaggccacccacccctgcc |
| | | ccgaccatcgcctctcagccgctttccctgcgtccggaggcatgtagacccgcag |
| | | ctggtggggccgtgcatacccggggtcttgacttcgcctgcgatatctacatttg |
| | | ggcccctctggctggtacttgcggggtcctgctgctttcactcgtgatcactctt |
| | | tactgtaagcgcggtcggaagaagctgctgtacatctttaagcaacccttcatga |
| | | ggcctgtgcagactactcaagaggaggacggctgttcatgccggttcccagagga |
| | | ggaggaaggcggctgcgaactgcgcgtgaaattcagccgcagcgcagatgctcca |
| | | gcctacaagcaggggcagaaccagctctacaacgaactcaatcttggtcggagag |
| | | aggagtacgacgtgctggacaagcggagaggacgggacccagaaatgggcgggaa |
| | | gccgcgcagaaagaatccccaagagggcctgtacaacgagctccaaaaggataag |
| | | atggcagaagcctatagcgagattggtatgaaaggggaacgcagaagaggcaaag |
| | | gccacgacggactgtaccagggactcagcaccgccaccaaggacacctatgacgc |
| | | tcttcacatgcaggccctgccgcctcgg |
| 104877 | 907 | MALPVTALLLPLALLLHAARPqvqlqesgpglvkpsetlsltctvsgvslpdygv |
| CAR 3 | | swirgppgkglewigviwgsettyyssslksrvtiskdnsknqvslklssvtaad |
| Full - aa | | tavyycakhyyyggsyamdywgqgtlvtvssggggsggggsggggseivmtgspa |
| | | tisispgeratlscrasqdiskylnwyggkpgqaprlliyhtsrlhsgiparfsg |
| | | sgsgtdytltisslqpedfavyfcqqgntlpytfgqgtkleiktttpaprpptpa |
| | | ptiasqplslrpeacrpaaggavhtrgldfacdiyiwaplagtcgvlllsivitl |
| | | yckrgrkkllyifkqpfmrpvqttqeedgcscrfpeeeeggcelrykfsrsadap |
| | | aykqgqnqlynelnlgrreeydvidkrrgrdpemggkprrknpqeglynelqkdk |
| | | maeayseigmkgerrrgkghdglyggistatkdtydalhmqalppr |

CAR 4

| | | |
|---|---|---|
| CAR 4 scFv | 908 | qvqlgesgpglvkpsetlsltctvsgvslpdygvswirgppgkglewigviwgse |
| domain | | ttyyqsslksrvtiskdnsknqvslklssvtaadtavyycakhyyyggsyamdyw |
| | | gqgtlvtvssggggsggggsggggseivmtqspatlslspgeratlscrasqdis |
| | | kylnwyqqkpgqaprlliyhtsrlhsgiparfsgsgsgtdytltisslqpedfav |
| | | yfcqqgntlpytfgqgtkleik |
| 103106 | 909 | atggctctgcccgtgaccgcactcctcctgccactggctctgctgcttcacgccg |
| CAR 4 - | | ctcgcccacaagtccagcttcaagaatcagggcctggtctggtgaagccatctga |
| Soluble | | gactctgtccctcacttgcaccgtgagcggagtgtccctcccagactacggagtg |
| scFv - nt | | agctggattagacagcctcccggaaagggactggagtggatcggagtgatttggg |
| | | gtagcgaaaccacttactatcaatcttccctgaagtcacgggtcaccatttcaaa |
| | | ggataactcaaagaatcaagtgagcctcaagctctcatcagtcaccgccgctgac |
| | | accgccgtgtattactgtgccaagcattactactatggagggtcctacgccatgg |
| | | actactggggccagggaactctggtcactgtgtcatctggtggaggaggtagcgg |
| | | aggaggcgggagcggtggaggtggctccgaaatcgtgatgacccagagccctgca |
| | | accctgtccctttctcccggggaacgggctaccctttcttgtcgggcatcacaag |
| | | atatctcaaaatacctcaattggtatcaacagaagccgggacaggcccctaggct |
| | | tcttatctaccacacctctcgcctgcatagcgggattcccgcacgctttagcggg |
| | | tctggaagcgggaccgactacactctgaccatctcatctctccagcccgaggact |
| | | tcgccgtctacttctgccagcagggtaacaccctgccgtacaccttcggccaggg |
| | | caccaagcttgagatcaaacatcaccaccatcatcaccatcac |
| 103106 | 910 | MALPVTALLLPLALLLHAARPqvqlqesgpglvkpsetlsltctvsgvslpdygv |
| CAR 4 - | | swirqppgkglewigviwgsettyyqsslksrvtiskdnsknqvslklssvtaad |
| Soluble | | tavyycakhyyyggsyamdywgqgtlvtvssggggsggggsggggseivmtqspa |
| scFv -aa | | tlslspgeratlscrasqdiskylnwyqqkpgqaprlliyhtsrlhsgiparfsg |
| | | sgsgtdytltisslqpedfavyfcqqgntlpytfgpgtkleikhhhhhhhh |
| 104878 | 911 | atggctctgcccgtgaccgcactcctcctgccactggctctgctgcttcacgccg |
| CAR 4 - | | ctcgcccacaagtccagcttcaagaatcagggcctggtctggtgaagccatctga |
| Full - nt | | gactctgtccctcacttgcaccgtgagcggagtgtccctcccagactacggagtg |
| | | agctggattagacagcctcccggaaagggactggagtggatcggagtgatttggg |
| | | gtagcgaaaccacttactatcaatcttccctgaagtcacgggtcaccatttcaaa |
| | | ggataactcaaagaatcaagtgagcctcaagctctcatcagtcaccgccgctgac |
| | | accgccgtgtattactgtgccaagcattactactatggagggtcctacgccatgg |
| | | actactggggccagggaactctggtcactgtgtcatctggtggaggaggtagcgg |
| | | aggaggcgggagcggtggaggtggctccgaaatcgtgatgacccagagccctgca |
| | | accctgtccctttctcccggggaacgggctaccctttcttgtcgggcatcacaag |
| | | atatctcaaaatacctcaattggtatcaacagaagccgggacaggcccctaggct |
| | | tcttatctaccacacctctcgcctgcatagcgggattcccgcacgctttagcggg |
| | | tctggaagcgggaccgactacactctgaccatctcatctctccagcccgaggact |
| | | tcgccgtctacttctgccagcagggtaacaccctgccgtacaccttcggccaggg |
| | | caccaagcttgagatcaaaaccactactcccgctccaaggccacccacccctgcc |
| | | ccgaccatcgcctctcagccgctttccctgcgtccggaggcatgtagacccgcag |
| | | ctggtggggccgtgcatacccggggtcttgacttcgcctgcgatatctacatttg |
| | | ggcccctctggctggtacttgcggggtcctgctgctttcactcgtgatcactctt |
| | | tactgtaagcgcggtcggaagaagctgctgtacatctttaagcaacccttcatga |
| | | ggcctgtgcagactactcaagaggaggacggctgttcatgccggttcccagagga |
| | | ggaggaaggcggctgcgaactgcgcgtgaaattcagccgcagcgcagatgctcca |
| | | gcctacaagcaggggcagaaccagctctacaacgaactcaatcttggtcggagag |
| | | aggagtacgacgtgctggacaagcggagaggacgggacccagaaatgggcgggaa |
| | | gccgcgcagaaagaatccccaagagggcctgtacaacgagctccaaaaggataag |
| | | atggcagaagcctatagcgagattggtatgaaaggggaacgcagaagaggcaaag |
| | | gccacgacggactgtaccagggactcagcaccgccaccaaggacacctatgacgc |
| | | tcttcacatgcaggccctgccgcctcgg |
| 104878 | 912 | MALPVTALLLPLALLLHAARPqvqlqesgpglvkpsetlsltctvsgvslpdygv |
| CAR 4 - | | swirgppgkglewigviwgsettyyqsslksrvtiskdnsknqvslklssvtaad |
| Full - aa | | tavyycakhyyyggsyamdywgqgtlvtvssggggsggggsggggseivmtgspa |
| | | tlslspgeratlscrasqdiskylnwyqqkpgqaprlliyhtsrlhsgiparfsg |
| | | sgsgtdytltisslgpedfavyfcqqgntlpytfgqgtkleiktttpaprpptpa |
| | | ptiasgplslrpeacrpaaggavhtrgldfacdiyiwaplagtcgvlllslvitl |
| | | yckrgrkkllyifkgpfmrpvgttqeedgcscrfpeeeeggcelrvkfsrsadap |
| | | aykgggnglynelnlgrreeydvldkrrgrdpemggkprrknpqeglynelgkdk |
| | | maeayseigmkgerrrgkghdglygglstatkdtydalhmqalppr |

CAR 5

| | | |
|---|---|---|
| CAR5 scFv | 913 | eivmtqspatlslspgeratlscrasqdiskylnwyggkpgqaprlliyhtsrlh |
| domain | | sgiparfsgsgsgtdytltisslgpedfavyfcqqgntlpytfgqgtkleikggg |
| | | gsggggsggggsggggsqvqlgesgpglvkpsetlsltctvsgvslpdygvswir |
| | | gppgkglewigviwgsettyyssslksrvtiskdnsknqvslklssvtaadtavy |
| | | ycakhyyyggsyamdywgggtlvtvss |
| 99789 | 914 | atggccctcccagtgaccgctctgctgctgcctctcgcacttcttctccatgccg |
| CAR 5 - | | ctcggcctgagatcgtcatgacccaaagccccgctaccctgtccctgtcacccgg |
| Soluble | | cgagagggcaaccctttcatgcagggccagccaggacatttctaagtacctcaac |
| scFv - nt | | tggtatcagcagaagccagggcaggctcctcgcctgctgatctaccacaccagcc |
| | | gcctccacagcggtatccccgccagattttccgggagcgggtctggaaccgacta |
| | | caccctcaccatctcttctctgcagcccgaggatttcgccgtctatttctgccag |
| | | caggggaatactctgccgtacaccttcggtcaaggtaccaagctggaaatcaagg |
| | | gaggcggaggatcaggcggtggcggaagcggaggaggtggctccggaggaggagg |
| | | ttcccaagtgcagcttcaagaatcaggacccggacttgtgaagccatcagaaacc |
| | | ctctccctgacttgtaccgtgtccggtgtgagcctccccgactacggagtctctt |
| | | ggattcgccagcctccggggaagggtcttgaatggattggggtgatttggggatc |
| | | agagactacttactactcttcatcacttaagtcacgggtcaccatcagcaaagat |
| | | aatagcaagaaccaagtgtcacttaagctgtcatctgtgaccgccgctgacaccg |
| | | ccgtgtactattgtgccaaacattactattacggagggtcttatgctatggacta |
| | | ctggggacaggggaccctggtgactgtctctagccatcaccatcaccaccatcat |
| | | cac |
| 99789 | 915 | MALPVTALLLPLALLLHAARPeivmtqspatlslspgeratlscrasgdiskyln |
| CAR 5 - | | wyqqkpgqaprlliyhtsrlhsgiparfsgsgsgtdytltisslgpedfavyfcq |
| Soluble | | qgntlpytfgqgtkleikggggsggggsggggsggggsqvqlgesgpglvkpset |
| scFv - aa | | lsltctvsgvslpdygyswirqppgkglewigviwgsettyyssslksrvtiskd |
| | | nskngvslklssvtaadtavyycakhyyyggsyamdywgggtlvtvsshhhhhhh |
| | | h |
| 104879 | 916 | atggccctccctgtcaccgccctgctgcttccgctggctcttctgctccacgccg |
| CAR 5 - | | ctcggcccgaaattgtgatgacccagtcacccgccactcttagcctttcacccgg |
| Full - nt | | tgagcgcgcaaccctgtcttgcagagcctcccaagacatctcaaaataccttaat |
| | | tggtatcaacagaagcccggacaggctcctcgccttctgatctaccacaccagcc |
| | | ggctccattctggaatccctgccaggttcagcggtagcggatctgggaccgacta |
| | | caccctcactatcagctcactgcagccagaggacttcgctgtctatttctgtcag |
| | | caagggaacaccctgccctacacctttggacagggcaccaagctcgagattaaag |
| | | gtggaggtggcagcggaggaggtgggtccggcggtggaggaagcggcggaggcgg |
| | | gagccaggtccaactccaagaaagcggaccgggtcttgtgaagccatcagaaact |
| | | ctttcactgacttgtactgtgagcggagtgtctctccccgattacggggtgtctt |
| | | ggatcagacagccaccggggaagggtctggaatggattggagtgatttggggctc |
| | | tgagactacttactactcttcatccctcaagtcacgcgtcaccatctcaaaggac |
| | | aactctaagaatcaggtgtcactgaaactgtcatctgtgaccgcagccgacaccg |
| | | ccgtgtactattgcgctaagcattactattatggcgggagctacgcaatggatta |
| | | ctggggacagggtactctggtcaccgtgtccagcaccactaccccagcaccgagg |
| | | ccacccaccccggctcctaccatcgcctcccagcctctgtccctgcgtccggagg |
| | | catgtagacccgcagctggtggggccgtgcatacccggggtcttgacttcgcctg |
| | | cgatatctacatttgggcccctctggctggtacttgcggggtcctgctgctttca |
| | | ctcgtgatcactctttactgtaagcgcggtcggaagaagctgctgtacatcttta |
| | | agcaacccttcatgaggcctgtgcagactactcaagaggaggacggctgttcatg |
| | | ccggttcccagaggaggaggaaggcggctgcgaactgcgcgtgaaattcagccgc |
| | | agcgcagatgctccagcctacaagcaggggcagaaccagctctacaacgaactca |
| | | atcttggtcggagagaggagtacgacgtgctggacaagcggagaggacgggaccc |
| | | agaaatgggcgggaagccgcgcagaaagaatccccaagagggcctgtacaacgag |
| | | ctccaaaaggataagatggcagaagcctatagcgagattggtatgaaaggggaac |
| | | gcagaagaggcaaaggccacgacggactgtaccagggactcagcaccgccaccaa |
| | | ggacacctatgacgctcttcacatgcaggccctgccgcctcgg |
| 104879 | 917 | MALPVTALLLPLALLLHAARPeivmtqspatlslspgeratlscrasqdiskyln |
| CAR 5 - | | wyggkpggaprlliyhtsrlhsgiparfsgsgsgtdytltissigpedfavyfcq |
| Full - aa | | qgntlpytfgqgtkleikggggsggggsggggsggggsqvqlqesgpglvkpset |
| | | lsltctvsgvslpdygvswirqppgkglewigviwgsettyyssslksrvtiskd |
| | | nsknqvslklssvtaadtavyycakhyyyggsyamdywgqgtlvtvsstttpapr |
| | | pptpaptiasqplslrpeacrpaaggavhtrgldfacdiyiwaplagtcgvllls |
| | | lvitlyckrgrkkllyifkgpfmrpvgttqeedgcscrfpeeeeggcelrykfsr |
| | | sadapaykqgqnqlynelnlgrreeydvldkrrgrdpemggkprrknpqeglyne |
| | | lgkdkmaeayseigmkgerrrgkghdglygglstatkdtydalhmqalppr |

CAR 6

| | | |
|---|---|---|
| CAR 6 | 918 | eivmtqspatlslspgeratlscrasgdiskylnwyggkpgqaprlliyhtsrlh |
| scFv | | sgiparfsgsgsgtdytltisslqpedfavyfcqqgntlpytfgqgtkleikggg |
| domain | | gsggggsggggsggggsqvqlqesgpglvkpsetlsltctvsgvslpdygvswir |
| | | qppgkglewigviwgsettyygsslksrvtiskdnsknqvslklssvtaadtavy |
| | | ycakhyyyggsyamdywgqgtlvtvss |
| 99790 | 919 | atggccctcccagtgaccgctctgctgctgcctctcgcacttcttctccatgccg |
| CAR 6 - | | ctcggcctgagatcgtcatgacccaaagccccgctaccctgtccctgtcacccgg |
| Soluble | | cgagagggcaaccctttcatgcagggccagccaggacatttctaagtacctcaac |
| scFv - nt | | tggtatcagcagaagccagggcaggctcctcgcctgctgatctaccacaccagcc |
| | | gcctccacagcggtatccccgccagattttccgggagcgggtctggaaccgacta |
| | | caccctcaccatctcttctctgcagcccgaggatttcgccgtctatttctgccag |
| | | caggggaatactctgccgtacaccttcggtcaaggtaccaagctggaaatcaagg |
| | | gaggcggaggatcaggcggtggcggaagcggaggaggtggctccggaggaggagg |
| | | ttcccaagtgcagcttcaagaatcaggacccggacttgtgaagccatcagaaacc |
| | | ctctccctgacttgtaccgtgtccggtgtgagcctccccgactacggagtctctt |
| | | ggattcgccagcctccggggaagggtcttgaatggattggggtgatttggggatc |
| | | agagactacttactaccagtcatcacttaagtcacgggtcaccatcagcaaagat |
| | | aatagcaagaaccaagtgtcacttaagctgtcatctgtgaccgccgctgacaccg |
| | | ccgtgtactattgtgccaaacattactattacggagggtcttatgctatggacta |
| | | ctggggacaggggaccctggtgactgtctctagccatcaccatcaccaccatcat |
| | | cac |
| 99790 | 920 | MALPVTALLLPLALLLHAARPeivmtqspatlslspgeratlscrasqdiskyln |
| CAR 6 - | | wyggkpgqaprlliyhtsrlhsgiparfsgsgsgtdytltissigpedfavyfcq |
| Soluble | | qgntlpytfgqgtkleikggggsggggsggggsggggsqvqlqesgpglvkpset |
| scFv - aa | | lsltctvsgyslpdygyswirqppgkglewigviwgsettyygsslksrvtiskd |
| | | nsknqvslklssvtaadtavyycakhyyyggsyamdywgqgtlvtvsshhhhhhh |
| | | h |
| 104880 | 921 | atggccctccctgtcaccgccctgctgcttccgctggctcttctgctccacgccg |
| CAR 6 - | | ctcggcccgaaattgtgatgacccagtcacccgccactcttagcctttcacccgg |
| Full - nt | | tgagcgcgcaaccctgtcttgcagagcctcccaagacatctcaaaataccttaat |
| | | tggtatcaacagaagcccggacaggctcctcgccttctgatctaccacaccagcc |
| | | ggctccattctggaatccctgccaggttcagcggtagcggatctgggaccgacta |
| | | caccctcactatcagctcactgcagccagaggacttcgctgtctatttctgtcag |
| | | caagggaacaccctgccctacacctttggacagggcaccaagctcgagattaaag |
| | | gtggaggtggcagcggaggaggtgggtccggcggtggaggaagcggaggcggagg |
| | | gagccaggtccaactccaagaaagcggaccgggtcttgtgaagccatcagaaact |
| | | ctttcactgacttgtactgtgagcggagtgtctctccccgattacggggtgtctt |
| | | ggatcagacagccaccggggaagggtctggaatggattggagtgatttggggctc |
| | | tgagactacttactaccaatcatccctcaagtcacgcgtcaccatctcaaaggac |
| | | aactctaagaatcaggtgtcactgaaactgtcatctgtgaccgcagccgacaccg |
| | | ccgtgtactattgcgctaagcattactattatggcgggagctacgcaatggatta |
| | | ctggggacagggtactctggtcaccgtgtccagcaccactaccccagcaccgagg |
| | | ccacccaccccggctcctaccatcgcctcccagcctctgtccctgcgtccggagg |
| | | catgtagacccgcagctggtggggccgtgcatacccggggtcttgacttcgcctg |
| | | cgatatctacatttgggcccctctggctggtacttgcggggtcctgctgctttca |
| | | ctcgtgatcactctttactgtaagcgcggtcggaagaagctgctgtacatcttta |
| | | agcaacccttcatgaggcctgtgcagactactcaagaggaggacggctgttcatg |
| | | ccggttcccagaggaggaggaaggcggctgcgaactgcgcgtgaaattcagccgc |
| | | agcgcagatgctccagcctacaagcaggggcagaaccagctctacaacgaactca |
| | | atcttggtcggagagaggagtacgacgtgctggacaagcggagaggacgggaccc |
| | | agaaatgggcgggaagccgcgcagaaagaatccccaagagggcctgtacaacgag |
| | | ctccaaaaggataagatggcagaagcctatagcgagattggtatgaaaggggaac |
| | | gcagaagaggcaaaggccacgacggactgtaccagggactcagcaccgccaccaa |
| | | ggacacctatgacgctcttcacatgcaggccctgccgcctcgg |
| 104880 | 922 | MALPVTALLLPLALLLHAARPeivmtqspatlslspgeratlscrasqdiskyln |
| CAR 6 - | | wyqqkpgqaprlliyhtsrlhsgiparfsgsgsgtdytltisslqpedfavyfcq |
| Full - aa | | qgntlpytfgqgtkleikggggsggggsggggsggggsqvqlqesgpglvkpset |
| | | lsltctvsgvslpdygvswirqppgkglewigviwgsettyygsslksrvtiskd |
| | | nsknqvslklssvtaadtavyycakhyyyggsyamdywgqgtlvtvsstttpapr |
| | | pptpaptiasgplslrpeacrpaaggavhtrgldfacdiyiwaplagtcgvllls |
| | | lvitlyckrgrkkllyifkgpfmrpvgttqeedgcscrfpeeeeggcelrvkfsr |
| | | sadapaykgggnglynelnlgrreeydvldkrrgrdpemggkprrknpqeglyne |
| | | lgkdkmaeayseigmkgerrrgkghdglygglstatkdtydalhmqalppr |

CAR 7

| | | |
|---|---|---|
| CAR 7 scFv | 923 | qvqlqesgpglvkpsetlsltctvsgvslpdygvswirgppgkglewigviwgse |
| domain | | ttyyssslksrvtiskdnsknqvslklssvtaadtavyycakhyyyggsyamdyw |
| | | gqgtlvtvssggggsggggsggggsggggseivmtqspatlslspgeratlscra |
| | | sqdiskylnwyqqkpgqaprlliyhtsrinsgiparfsgsgsgtdytltisslqp |
| | | edfavyfcqqgntlpytfgqgtkleik |
| 100796 | 924 | atggcactgcctgtcactgccctcctgctgcctctggccctccttctgcatgccg |
| CAR 7 - | | ccaggccccaagtccagctgcaagagtcaggacccggactggtgaagccgtctga |
| Soluble | | gactctctcactgacttgtaccgtcagcggcgtgtccctccccgactacggagtg |
| scFv - nt | | tcatggatccgccaacctcccgggaaagggcttgaatggattggtgtcatctggg |
| | | gttctgaaaccacctactactcatcttccctgaagtccagggtgaccatcagcaa |
| | | ggataattccaagaaccaggtcagccttaagctgtcatctgtgaccgctgctgac |
| | | accgccgtgtattactgcgccaagcactactattacggaggaagctacgctatgg |
| | | actattggggacagggcactctcgtgactgtgagcagcggcggtggagggtctgg |
| | | aggtggaggatccggtggtggtgggtcaggcggaggagggagcgagattgtgatg |
| | | actcagtcaccagccaccctttctctttcacccggcgagagagcaaccctgagct |
| | | gtagagccagccaggacatttctaagtacctcaactggtatcagcaaaaaccggg |
| | | gcaggcccctcgcctcctgatctaccatacctcacgccttcactctggtatcccc |
| | | gctcggtttagcggatcaggatctggtaccgactacactctgaccatttccagcc |
| | | tgcagccagaagatttcgcagtgtatttctgccagcagggcaatacccttcctta |
| | | caccttcggtcagggaaccaagctcgaaatcaagcaccatcaccatcatcaccac |
| | | cat |
| 100796 | 925 | MALPVTALLLPLALLLHAARPqvqlqesgpglvkpsetlsltctvsgvslpdygv |
| CAR 7 - | | swirqppgkglewigviwgsettyyssslksrvtiskdnsknqvslklssvtaad |
| Soluble | | tavyycaknyyyggsyamdywgqgtlvtvssggggsggggsggggsggggseivm |
| scFv - aa | | tqspatlslspgeratlscrasqdiskylnwyqqkpgqaprlliyhtsrinsgip |
| | | arfsgsgsgtdytltisslqpedfavyfcqqgntlpytfgqgtkleikhhhhhhh |
| | | h |
| 104881 | 926 | atggctctgcccgtgaccgcactcctcctgccactggctctgctgcttcacgccg |
| CAR 7 | | ctcgcccacaagtccagcttcaagaatcagggcctggtctggtgaagccatctga |
| Full - nt | | gactctgtccctcacttgcaccgtgagcggagtgtccctcccagactacggagtg |
| | | agctggattagacagcctcccggaaagggactggagtggatcggagtgatttggg |
| | | gtagcgaaaccacttactattcatcttccctgaagtcacgggtcaccatttcaaa |
| | | ggataactcaaagaatcaagtgagcctcaagctctcatcagtcaccgccgctgac |
| | | accgccgtgtattactgtgccaagcattactactatggagggtcctacgccatgg |
| | | actactggggccagggaactctggtcactgtgtcatctggtggaggaggtagcgg |
| | | aggaggcgggagcggtggaggtggctccggaggtggcggaagcgaaatcgtgatg |
| | | acccagagccctgcaaccctgtccctttctcccggggaacgggctaccctttctt |
| | | gtcgggcatcacaagatatctcaaaatacctcaattggtatcaacagaagccggg |
| | | acaggcccctaggcttcttatctaccacacctctcgcctgcatagcgggattccc |
| | | gcacgctttagcgggtctggaagcgggaccgactacactctgaccatctcatctc |
| | | tccagcccgaggacttcgccgtctacttctgccagcagggtaacaccctgccgta |
| | | caccttcggccagggcaccaagcttgagatcaaaaccactactcccgctccaagg |
| | | ccacccacccctgccccgaccatcgcctctcagccgctttccctgcgtccggagg |
| | | catgtagacccgcagctggtggggccgtgcatacccggggtcttgacttcgcctg |
| | | cgatatctacatttgggcccctctggctggtacttgcggggtcctgctgctttca |
| | | ctcgtgatcactctttactgtaagcgcggtcggaagaagctgctgtacatcttta |
| | | agcaacccttcatgaggcctgtgcagactactcaagaggaggacggctgttcatg |
| | | ccggttcccagaggaggaggaaggcggctgcgaactgcgcgtgaaattcagccgc |
| | | agcgcagatgctccagcctacaagcaggggcagaaccagctctacaacgaactca |
| | | atcttggtcggagagaggagtacgacgtgctggacaagcggagaggacgggaccc |
| | | agaaatgggcgggaagccgcgcagaaagaatccccaagagggcctgtacaacgag |
| | | ctccaaaaggataagatggcagaagcctatagcgagattggtatgaaaggggaac |
| | | gcagaagaggcaaaggccacgacggactgtaccagggactcagcaccgccaccaa |
| | | ggacacctatgacgctcttcacatgcaggccctgccgcctcgg |
| 104881 | 927 | MALPVTALLLPLALLLHAARPqvqlqesgpglvkpsetlsltctvsgvslpdygv |
| CAR 7 | | swirqppgkglewigviwgsettyyssslksrvtiskdnsknqvslklssvtaad |
| Full - aa | | tavyycakhyyyggsyamdywgqgtlvtvssggggsggggsggggsggggseivm |
| | | tqspatlslspgeratlscrasqdiskylnwyqqkpgqaprlliyhtsrlhsgip |
| | | arfsgsgsgtdytltisslqpedfavyfcqqgntlpytfgqgtkleiktttpapr |
| | | pptpaptiasqplslrpeacrpaaggavhtrgldfacdiyiwaplagtcgvllls |
| | | lvitlyckrgrkkllyifkqpfmrpvqttqeedgcscrfpeeeeggcelrvkfsr |
| | | sadapaykqgqnqlynelnlgrreeydvldkrrgrdpemggkprrknpqeglyne |
| | | lqkdkmaeayseigmkgerrrgkghdglyggistatkdtydalhmqalppr |

CAR 8

| | | |
|---|---|---|
| CAR 8 scFv | 928 | qvqlqesgpglvkpsetlsltctvsgvslpdygvswirqppgkglewigviwgse |
| domain | | ttyyqsslksrvtiskdnsknqvslklssvtaadtavyycakhyyyggsyamdyw |
| | | gqgtlvtvssggggsggggsggggsggggseivmtqspatlslspgeratlscra |
| | | sqdiskylnwyqqkpgqaprlliyhtsrlhsgiparfsgsgsgtdytltisslqp |
| | | edfavyfcqqgntlpytfgqgtkleik |
| 100798 | 929 | atggcactgcctgtcactgccctcctgctgcctctggccctccttctgcatgccg |
| CAR 8 - | | ccaggccccaagtccagctgcaagagtcaggacccggactggtgaagccgtctga |
| Soluble | | gactctctcactgacttgtaccgtcagcggcgtgtccctccccgactacggagtg |
| scFV - nt | | tcatggatccgccaacctcccgggaaagggcttgaatggattggtgtcatctggg |
| | | gttctgaaaccacctactaccagtcttccctgaagtccagggtgaccatcagcaa |
| | | ggataattccaagaaccaggtcagccttaagctgtcatctgtgaccgctgctgac |
| | | accgccgtgtattactgcgccaagcactactattacggaggaagctacgctatgg |
| | | actattggggacagggcactctcgtgactgtgagcagcggcggtggagggtctgg |
| | | aggtggaggatccggtggtggtgggtcaggcggaggagggagcgagattgtgatg |
| | | actcagtcaccagccaccctttctctttcacccggcgagagagcaaccctgagct |
| | | gtagagccagccaggacatttctaagtacctcaactggtatcagcaaaaaccggg |
| | | gcaggcccctcgcctcctgatctaccatacctcacgccttcactctggtatcccc |
| | | gctcggtttagcggatcaggatctggtaccgactacactctgaccatttccagcc |
| | | tgcagccagaagatttcgcagtgtatttctgccagcagggcaatacccttcctta |
| | | caccttcggtcagggaaccaagctcgaaatcaagcaccatcaccatcatcatcac |
| | | cac |
| 100798 | 930 | MALPVTALLLPLALLLHAARPqvqlqesgpglvkpsetlsltctvsgvslpdygv |
| CAR 8 - | | swirgppgkglewigviwgsettyygsslksrvtiskdnsknqvslklssvtaad |
| Soluble | | tavyycakhyyyggsyamdywgggtlvtvssggggsggggsggggsggggseivm |
| scFv - aa | | tgspatlslspgeratlscrasgdiskylnwyggkpgqaprlliyhtsrlhsgip |
| | | arfsgsgsgtdytltisslgpedfavyfcqqgntlpytfgqgtkleikhhhhhhh |
| | | h |
| 104882 | 931 | atggctctgcccgtgaccgcactcctcctgccactggctctgctgcttcacgccg |
| CAR 8 - | | ctcgcccacaagtccagcttcaagaatcagggcctggtctggtgaagccatctga |
| Full - nt | | gactctgtccctcacttgcaccgtgagcggagtgtccctcccagactacggagtg |
| | | agctggattagacagcctcccggaaagggactggagtggatcggagtgatttggg |
| | | gtagcgaaaccacttactatcaatcttccctgaagtcacgggtcaccatttcaaa |
| | | ggataactcaaagaatcaagtgagcctcaagctctcatcagtcaccgccgctgac |
| | | accgccgtgtattactgtgccaagcattactactatggagggtcctacgccatgg |
| | | actactggggccagggaactctggtcactgtgtcatctggtggaggaggtagcgg |
| | | aggaggcgggagcggtggaggtggctccggaggcggtgggtcagaaatcgtgatg |
| | | acccagagccctgcaaccctgtccctttctcccggggaacgggctaccctttctt |
| | | gtcgggcatcacaagatatctcaaaatacctcaattggtatcaacagaagccggg |
| | | acaggcccctaggcttcttatctaccacacctctcgcctgcatagcgggattccc |
| | | gcacgctttagcgggtctggaagcgggaccgactacactctgaccatctcatctc |
| | | tccagcccgaggacttcgccgtctacttctgccagcagggtaacaccctgccgta |
| | | caccttcggccagggcaccaagcttgagatcaaaaccactactcccgctccaagg |
| | | ccacccacccctgccccgaccatcgcctctcagccgctttccctgcgtccggagg |
| | | catgtagacccgcagctggtggggccgtgcatacccggggtcttgacttcgcctg |
| | | cgatatctacatttgggcccctctggctggtacttgcggggtcctgctgctttca |
| | | ctcgtgatcactctttactgtaagcgcggtcggaagaagctgctgtacatcttta |
| | | agcaacccttcatgaggcctgtgcagactactcaagaggaggacggctgttcatg |
| | | ccggttcccagaggaggaggaaggcggctgcgaactgcgcgtgaaattcagccgc |
| | | agcgcagatgctccagcctacaagcaggggcagaaccagctctacaacgaactca |
| | | atcttggtcggagagaggagtacgacgtgctggacaagcggagaggacgggaccc |
| | | agaaatgggcgggaagccgcgcagaaagaatccccaagagggcctgtacaacgag |
| | | ctccaaaaggataagatggcagaagcctatagcgagattggtatgaaaggggaac |
| | | gcagaagaggcaaaggccacgacggactgtaccagggactcagcaccgccaccaa |
| | | ggacacctatgacgctcttcacatgcaggccctgccgcctcgg |
| 104882 | 932 | MALPVTALLLPLALLLHAARPqvqlqesgpglvkpsetlsltctvsgvslpdygv |
| CAR 8 - | | swirqppgkglewigviwgsettyyqsslksrvtiskdnsknqvslklssvtaad |
| Full - aa | | tavyycakhyyyggsyamdywgqgtlvtvssggggsggggsggggsggggseivm |
| | | tqspatlslspgeratlscrasqdiskylnwyqqkpgqaprlliyhtsrlhsgip |
| | | arfsgsgsgtdytltisslqpedfavyfcqqgntlpytfgqgtkleiktttpapr |
| | | pptpaptiasgplslrpeacrpaaggavhtrgldfacdiyiwaplagtcgvllls |
| | | lvitlyckrgrkkllyifkgpfmrpvgttqeedgcscrfpeeeeggcelrykfsr |
| | | sadapaykgggnglynelnlgrreeydvidkrrgrdpemggkprrknpqeglyne |
| | | lgkdkmaeayseigmkgerrrgkghdglyggistatkdtydalhmqalppr |

CAR 9

| | | |
|---|---|---|
| CAR 9 scFv | 933 | eivmtqspatlslspgeratlscrasgdiskylnwyggkpgqaprlliyhtsrlh |
| domain | | sgiparfsgsgsgtdytltisslqpedfavyfcqqgntlpytfgqgtkleikggg |
| | | gsggggsggggsggggsqvqlqesgpglvkpsetlsltctvsgvslpdygvswir |
| | | qppgkglewigviwgsettyynsslksrvtiskdnsknqvslklssvtaadtavy |
| | | ycakhyyyggsyamdywgqgtlvtvss |
| 99789 | 934 | atggccctcccagtgaccgctctgctgctgcctctcgcacttcttctccatgccg |
| CAR 9 - | | ctcggcctgagatcgtcatgacccaaagccccgctaccctgtccctgtcacccgg |
| Soluble | | cgagagggcaaccctttcatgcagggccagccaggacatttctaagtacctcaac |
| scFv - nt | | tggtatcagcagaagccagggcaggctcctcgcctgctgatctaccacaccagcc |
| | | gcctccacagcggtatccccgccagattttccgggagcgggtctggaaccgacta |
| | | caccctcaccatctcttctctgcagcccgaggatttcgccgtctatttctgccag |
| | | caggggaatactctgccgtacaccttcggtcaaggtaccaagctggaaatcaagg |
| | | gaggcggaggatcaggcggtggcggaagcggaggaggtggctccggaggaggagg |
| | | ttcccaagtgcagcttcaagaatcaggacccggacttgtgaagccatcagaaacc |
| | | ctctccctgacttgtaccgtgtccggtgtgagcctccccgactacggagtctctt |
| | | ggattcgccagcctccggggaagggtcttgaatggattggggtgatttggggatc |
| | | agagactacttactacaattcatcacttaagtcacgggtcaccatcagcaaagat |
| | | aatagcaagaaccaagtgtcacttaagctgtcatctgtgaccgccgctgacaccg |
| | | ccgtgtactattgtgccaaacattactattacggagggtcttatgctatggacta |
| | | ctggggacaggggaccctggtgactgtctctagccatcaccatcaccaccatcat |
| | | cac |
| 99789 | 935 | MALPVTALLLPLALLLHAARPeivmtqspatlslspgeratlscrasgdiskyln |
| CAR 9 - | | wyggkpgqaprlliyhtsrlhsgiparfsgsgsgtdytltissigpedfavyfcq |
| Soluble | | qgntlpytfgqgtkleikggggsggggsggggsggggsqvqlqesgpglvkpset |
| scFv - aa | | lsltctvsgyslpdygyswirqppgkglewigviwgsettyynsslksrvtiskd |
| | | nskngvslklssvtaadtavyycakhyyyggsyamdywgqgtlvtvsshhhhhhh |
| | | h |
| 105974 | 936 | atggccctccctgtcaccgccctgctgcttccgctggctcttctgctccacgccg |
| CAR 9 - | | ctcggcccgaaattgtgatgacccagtcacccgccactcttagcctttcacccgg |
| Full - nt | | tgagcgcgcaaccctgtcttgcagagcctcccaagacatctcaaaataccttaat |
| | | tggtatcaacagaagcccggacaggctcctcgccttctgatctaccacaccagcc |
| | | ggctccattctggaatccctgccaggttcagcggtagcggatctgggaccgacta |
| | | caccctcactatcagctcactgcagccagaggacttcgctgtctatttctgtcag |
| | | caagggaacaccctgccctacacctttggacagggcaccaagctcgagattaaag |
| | | gtggaggtggcagcggaggaggtgggtccggcggtggaggaagcggaggcggtgg |
| | | gagccaggtccaactccaagaaagcggaccgggtcttgtgaagccatcagaaact |
| | | ctttcactgacttgtactgtgagcggagtgtctctccccgattacggggtgtctt |
| | | ggatcagacagccaccggggaagggtctggaatggattggagtgatttggggctc |
| | | tgagactacttactacaactcatccctcaagtcacgcgtcaccatctcaaaggac |
| | | aactctaagaatcaggtgtcactgaaactgtcatctgtgaccgcagccgacaccg |
| | | ccgtgtactattgcgctaagcattactattatggcgggagctacgcaatggatta |
| | | ctggggacagggtactctggtcaccgtgtccagcaccactaccccagcaccgagg |
| | | ccacccaccccggctcctaccatcgcctcccagcctctgtccctgcgtccggagg |
| | | catgtagacccgcagctggtggggccgtgcatacccggggtcttgacttcgcctg |
| | | cgatatctacatttgggcccctctggctggtacttgcggggtcctgctgctttca |
| | | ctcgtgatcactctttactgtaagcgcggtcggaagaagctgctgtacatcttta |
| | | agcaacccttcatgaggcctgtgcagactactcaagaggaggacggctgttcatg |
| | | ccggttcccagaggaggaggaaggcggctgcgaactgcgcgtgaaattcagccgc |
| | | agcgcagatgctccagcctacaagcaggggcagaaccagctctacaacgaactca |
| | | atcttggtcggagagaggagtacgacgtgctggacaagcggagaggacgggaccc |
| | | agaaatgggcgggaagccgcgcagaaagaatccccaagagggcctgtacaacgag |
| | | ctccaaaaggataagatggcagaagcctatagcgagattggtatgaaaggggaac |
| | | gcagaagaggcaaaggccacgacggactgtaccagggactcagcaccgccaccaa |
| | | ggacacctatgacgctcttcacatgcaggccctgccgcctcgg |
| 105974 | 937 | MALPVTALLLPLALLLHAARPeivmtqspatlslspgeratlscrasqdiskyln |
| CAR 9 - | | wyqqkpgqaprlliyhtsrlhsgiparfsgsgsgtdytltisslqpedfavyfcq |
| Full - aa | | qgntlpytfgqgtkleikggggsggggsggggsggggsqvqlqesgpglvkpset |
| | | lsltctvsgvslpdygvswirqppgkglewigviwgsettyynsslksrvtiskd |
| | | nsknqvslklssvtaadtavyycakhyyyggsyamdywgqgtlvtvsstttpapr |
| | | pptpaptiasqplslrpeacrpaaggavhtrgldfacdiyiwaplagtcgvllls |
| | | lvitlyckrgrkkllyifkqpfmrpvqttqeedgcscrfpeeeeggcelrvkfsr |
| | | sadapaykqgqnqlynelnlgrreeydvidkrrgrdpemggkprrknpqeglyne |
| | | lqkdkmaeayseigmkgerrrgkghdglyggistatkdtydalhmqalppr |

CAR 10

| | | |
|---|---|---|
| CAR 10 | 938 | qvqlqesgpglvkpsetlsltctvsgvslpdygvswirqppgkglewigviwgse |
| scFv | | ttyynsslksrvtiskdnsknqvslklssvtaadtavyycakhyyyggsyamdyw |
| domain | | gqgtlvtvssggggsggggsggggsggggseivmtqspatlslspgeratlscra |
| | | sqdiskylnwyqqkpgqaprlliyhtsrlhsgiparfsgsgsgtdytltisslqp |
| | | edfavyfcqqgntlpytfgqgtkleik |
| 100796 | 939 | atggcactgcctgtcactgccctcctgctgcctctggccctccttctgcatgccg |
| CAR 10 - | | ccaggccccaagtccagctgcaagagtcaggacccggactggtgaagccgtctga |
| Soluble | | gactctctcactgacttgtaccgtcagcggcgtgtccctccccgactacggagtg |
| scFV - nt | | tcatggatccgccaacctcccgggaaagggcttgaatggattggtgtcatctggg |
| | | gttctgaaaccacctactacaactcttccctgaagtccagggtgaccatcagcaa |
| | | ggataattccaagaaccaggtcagccttaagctgtcatctgtgaccgctgctgac |
| | | accgccgtgtattactgcgccaagcactactattacggaggaagctacgctatgg |
| | | actattggggacagggcactctcgtgactgtgagcagcggcggtggagggtctgg |
| | | aggtggaggatccggtggtggtgggtcaggcggaggagggagcgagattgtgatg |
| | | actcagtcaccagccaccctttctctttcacccggcgagagagcaaccctgagct |
| | | gtagagccagccaggacatttctaagtacctcaactggtatcagcaaaaaccggg |
| | | gcaggcccctcgcctcctgatctaccatacctcacgccttcactctggtatcccc |
| | | gctcggtttagcggatcaggatctggtaccgactacactctgaccatttccagcc |
| | | tgcagccagaagatttcgcagtgtatttctgccagcagggcaatacccttcctta |
| | | caccttcggtcagggaaccaagctcgaaatcaagcaccatcaccatcatcaccac |
| | | cat |
| 100796 | 940 | MALPVTALLLPLALLLHAARPqvqlqesgpglvkpsetlsltctvsgvslpdygv |
| CAR 10 - | | swirgppgkglewigviwgsettyynsslksrvtiskdnsknqvslklssvtaad |
| Soluble | | tavyycakhyyyggsyamdywgggtlvtvssggggsggggsggggsggggseivm |
| scFv - aa | | tgspatlslspgeratlscrasgdiskylnwyggkpgqaprlliyhtsrlhsgip |
| | | arfsgsgsgtdytltisslgpedfavyfcqqgntlpytfgqgtkleikhhhhhhh |
| | | h |
| 105975 | 941 | atggccctccctgtcaccgccctgctgcttccgctggctcttctgctccacgccg |
| CAR 10 | | ctcggcccgaaattgtgatgacccagtcacccgccactcttagcctttcacccgg |
| Full - nt | | tgagcgcgcaaccctgtcttgcagagcctcccaagacatctcaaaataccttaat |
| | | tggtatcaacagaagcccggacaggctcctcgccttctgatctaccacaccagcc |
| | | ggctccattctggaatccctgccaggttcagcggtagcggatctgggaccgacta |
| | | caccctcactatcagctcactgcagccagaggacttcgctgtctatttctgtcag |
| | | caagggaacaccctgccctacacctttggacagggcaccaagctcgagattaaag |
| | | gtggaggtggcagcggaggaggtgggtccggcggtggaggaagcggaggcggtgg |
| | | gagccaggtccaactccaagaaagcggaccgggtcttgtgaagccatcagaaact |
| | | ctttcactgacttgtactgtgagcggagtgtctctccccgattacggggtgtctt |
| | | ggatcagacagccaccggggaagggtctggaatggattggagtgatttggggctc |
| | | tgagactacttactacaactcatccctcaagtcacgcgtcaccatctcaaaggac |
| | | aactctaagaatcaggtgtcactgaaactgtcatctgtgaccgcagccgacaccg |
| | | ccgtgtactattgcgctaagcattactattatggcgggagctacgcaatggatta |
| | | ctggggacagggtactctggtcaccgtgtccagcaccactaccccagcaccgagg |
| | | ccacccaccccggctcctaccatcgcctcccagcctctgtccctgcgtccggagg |
| | | catgtagacccgcagctggtggggccgtgcatacccggggtcttgacttcgcctg |
| | | cgatatctacatttgggcccctctggctggtacttgcggggtcctgctgctttca |
| | | ctcgtgatcactctttactgtaagcgcggtcggaagaagctgctgtacatcttta |
| | | agcaacccttcatgaggcctgtgcagactactcaagaggaggacggctgttcatg |
| | | ccggttcccagaggaggaggaaggcggctgcgaactgcgcgtgaaattcagccgc |
| | | agcgcagatgctccagcctacaagcaggggcagaaccagctctacaacgaactca |
| | | atcttggtcggagagaggagtacgacgtgctggacaagcggagaggacgggaccc |
| | | agaaatgggcgggaagccgcgcagaaagaatccccaagagggcctgtacaacgag |
| | | ctccaaaaggataagatggcagaagcctatagcgagattggtatgaaaggggaac |
| | | gcagaagaggcaaaggccacgacggactgtaccagggactcagcaccgccaccaa |
| | | ggacacctatgacgctcttcacatgcaggccctgccgcctcgg |
| 105975 | 942 | MALPVTALLLPLALLLHAARPEIVMTQSPATLSLSPGERATLSCRASQDISKYLN |
| CAR 10 | | WYQQKPGQAPRLLIYHTSRLHSGIPARFSGSGSGTDYTLTISSLQPEDFAVYFCQ |
| Full - aa | | QGNTLPYTFGQGTKLEIKGGGGSGGGGSGGGGSGGGGSQVQLQESGPGLVKPSET |
| | | LSLTCTVSGVSLPDYGVSWIRQPPGKGLEWIGVIWGSETTYYNSSLKSRVTISKD |
| | | NSKNQVSLKLSSVTAADTAVYYCAKHYYYGGSYAMDYWGQGTLVTVSSTTTPAPR |
| | | PPTPAPTIASQPLSLRPEACRPAAGGAVHTRGLDFACDIYIWAPLAGTCGVLLLS |
| | | LVITLYCKRGRKKLLYIFKQPFMRPVQTTQEEDGCSCRFPEEEEGGCELRVKFSR |
| | | SADAPAYKQGQNQLYNELNLGRREEYDVLDKRRGRDPEMGGKPRRKNPQEGLYNE |
| | | LQKDKMAEAYSEIGMKGERRRGKGHDGLYQGLSTATKDTYDALHMQALPPR |

CAR 11

| | | |
|---|---|---|
| CAR 11 | 943 | eivmtqspatlslspgeratlscrasgdiskylnwyggkpgqaprlliyhtsrlh |
| scFv | | sgiparfsgsgsgtdytltisslqpedfavyfcqqgntlpytfgqgtkleikggg |
| domain | | gsggggsggggsqvqlqesgpglvkpsetlsltctvsgvslpdygyswirgppgk |
| | | glewigviwgsettyynsslksrvtiskdnsknqvslklssvtaadtavyycakh |
| | | yyyggsyamdywgqgtlvtvss |
| 103101 | 944 | Atggccctccctgtcaccgccctgctgcttccgctggctcttctgctccacgccg |
| CAR 11 - | | ctcggcccgaaattgtgatgacccagtcacccgccactcttagcctttcacccgg |
| Soluble | | tgagcgcgcaaccctgtcttgcagagcctcccaagacatctcaaaataccttaat |
| scFv - nt | | tggtatcaacagaagcccggacaggctcctcgccttctgatctaccacaccagcc |
| | | ggctccattctggaatccctgccaggttcagcggtagcggatctgggaccgacta |
| | | caccctcactatcagctcactgcagccagaggacttcgctgtctatttctgtcag |
| | | caagggaacaccctgccctacacctttggacagggcaccaagctcgagattaaag |
| | | gtggaggtggcagcggaggaggtgggtccggcggtggaggaagccaggtccaact |
| | | ccaagaaagcggaccgggtcttgtgaagccatcagaaactctttcactgacttgt |
| | | actgtgagcggagtgtctctccccgattacggggtgtcttggatcagacagccac |
| | | cggggaagggtctggaatggattggagtgatttggggctctgagactacttacta |
| | | caattcatccctcaagtcacgcgtcaccatctcaaaggacaactctaagaatcag |
| | | gtgtcactgaaactgtcatctgtgaccgcagccgacaccgccgtgtactattgcg |
| | | ctaagcattactattatggcgggagctacgcaatggattactggggacagggtac |
| | | tctggtcaccgtgtccagccaccaccatcatcaccatcaccat |
| 103101 | 945 | MALPVTALLLPLALLLHAARPeivmtqspatlslspgeratlscrasgdiskyln |
| CAR 11 - | | wyggkpgqaprlliyhtsrlhsgiparfsgsgsgtdytltissigpedfavyfcq |
| Soluble | | qgntlpytfgqgtkleikggggsggggsggggsqvqlqesgpglvkpsetlsltc |
| scFv-aa | | tvsgysipdygvswirqppgkglewigviwgsettyynsslksrvtiskdnsknq |
| | | vslklssvtaadtavyycakhyyyggsyamdywgqgtlvtvsshhhhhhhh |
| 105976 | 946 | atggctctgcccgtgaccgcactcctcctgccactggctctgctgcttcacgccg |
| CAR 11 | | ctcgcccacaagtccagcttcaagaatcagggcctggtctggtgaagccatctga |
| Full - nt | | gactctgtccctcacttgcaccgtgagcggagtgtccctcccagactacggagtg |
| | | agctggattagacagcctcccggaaagggactggagtggatcggagtgatttggg |
| | | gtagcgaaaccacttactataactcttccctgaagtcacgggtcaccatttcaaa |
| | | ggataactcaaagaatcaagtgagcctcaagctctcatcagtcaccgccgctgac |
| | | accgccgtgtattactgtgccaagcattactactatggagggtcctacgccatgg |
| | | actactggggccagggaactctggtcactgtgtcatctggtggaggaggtagcgg |
| | | aggaggcgggagcggtggaggtggctccggaggtggcggaagcgaaatcgtgatg |
| | | acccagagccctgcaaccctgtccctttctcccggggaacgggctaccctttctt |
| | | gtcgggcatcacaagatatctcaaaatacctcaattggtatcaacagaagccggg |
| | | acaggcccctaggcttcttatctaccacacctctcgcctgcatagcgggattccc |
| | | gcacgctttagcgggtctggaagcgggaccgactacactctgaccatctcatctc |
| | | tccagcccgaggacttcgccgtctacttctgccagcagggtaacaccctgccgta |
| | | caccttcggccagggcaccaagcttgagatcaaaaccactactcccgctccaagg |
| | | ccacccacccctgccccgaccatcgcctctcagccgctttccctgcgtccggagg |
| | | catgtagacccgcagctggtggggccgtgcatacccggggtcttgacttcgcctg |
| | | cgatatctacatttgggcccctctggctggtacttgcggggtcctgctgctttca |
| | | ctcgtgatcactctttactgtaagcgcggtcggaagaagctgctgtacatcttta |
| | | agcaacccttcatgaggcctgtgcagactactcaagaggaggacggctgttcatg |
| | | ccggttcccagaggaggaggaaggcggctgcgaactgcgcgtgaaattcagccgc |
| | | agcgcagatgctccagcctacaagcaggggcagaaccagctctacaacgaactca |
| | | atcttggtcggagagaggagtacgacgtgctggacaagcggagaggacgggaccc |
| | | agaaatgggcgggaagccgcgcagaaagaatccccaagagggcctgtacaacgag |
| | | ctccaaaaggataagatggcagaagcctatagcgagattggtatgaaaggggaac |
| | | gcagaagaggcaaaggccacgacggactgtaccagggactcagcaccgccaccaa |
| | | ggacacctatgacgctcttcacatgcaggccctgccgcctcgg |
| 105976 | 947 | MALPVTALLLPLALLLHAARPQVQLQESGPGLVKPSETLSLTCTVSGVSLPDYGV |
| CAR 11 | | SWIRQPPGKGLEWIGVIWGSETTYYNSSLKSRVTISKDNSKNQVSLKLSSVTAAD |
| Full - aa | | TAVYYCAKHYYYGGSYAMDYWGQGTLVTVSSGGGGSGGGGSGGGGSGGGGSEIVM |
| | | TQSPATLSLSPGERATLSCRASQDISKYLNWYQQKPGQAPRLLIYHTSRLHSGIP |
| | | ARFSGSGSGTDYTLTISSLQPEDFAVYFCQQGNTLPYTFGQGTKLEIKTTTPAPR |
| | | PPTPAPTIASQPLSLRPEACRPAAGGAVHTRGLDFACDIYIWAPLAGTCGVLLLS |
| | | LVITLYCKRGRKKLLYIFKQPFMRPVQTTQEEDGCSCRFPEEEEGGCELRVKFSR |
| | | SADAPAYKQGQNQLYNELNLGRREEYDVLDKRRGRDPEMGGKPRRKNPQEGLYNE |
| | | LQKDKMAEAYSEIGMKGERRRGKGHDGLYQGLSTATKDTYDALHMQALPPR |

CAR 12

| | | |
|---|---|---|
| CAR 12 | 948 | qvqlqesgpglvkpsetlsltctvsgvslpdygyswirqppgkglewigviwgse |
| scFv | | ttyynsslksrvtiskdnsknqvslklssvtaadtavyycakhyyyggsyamdyw |
| domain | | gqgtlvtvssggggsggggsggggseivmtqspatlslspgeratlscrasqdis |
| | | kylnwyqqkpgqaprlliyhtsrlhsgiparfsgsgsgtdytltisslqpedfav |
| | | yfcqqgntlpytfgqgtkleik |
| 103104 | 949 | atggctctgcccgtgaccgcactcctcctgccactggctctgctgcttcacgccg |
| CAR 12 - | | ctcgcccacaagtccagcttcaagaatcagggcctggtctggtgaagccatctga |
| Soluble | | gactctgtccctcacttgcaccgtgagcggagtgtccctcccagactacggagtg |
| scFv - nt | | agctggattagacagcctcccggaaagggactggagtggatcggagtgatttggg |
| | | gtagcgaaaccacttactataactcttccctgaagtcacgggtcaccatttcaaa |
| | | ggataactcaaagaatcaagtgagcctcaagctctcatcagtcaccgccgctgac |
| | | accgccgtgtattactgtgccaagcattactactatggagggtcctacgccatgg |
| | | actactggggccagggaactctggtcactgtgtcatctggtggaggaggtagcgg |
| | | aggaggcgggagcggtggaggtggctccgaaatcgtgatgacccagagccctgca |
| | | accctgtccctttctcccggggaacgggctaccctttcttgtcgggcatcacaag |
| | | atatctcaaaatacctcaattggtatcaacagaagccgggacaggcccctaggct |
| | | tcttatctaccacacctctcgcctgcatagcgggattcccgcacgctttagcggg |
| | | tctggaagcgggaccgactacactctgaccatctcatctctccagcccgaggact |
| | | tcgccgtctacttctgccagcagggtaacaccctgccgtacaccttcggccaggg |
| | | caccaagcttgagatcaaacatcaccaccatcatcaccatcac |
| 103104 | 950 | MALPVTALLLPLALLLHAARPqvqlqesgpglvkpsetlsltctvsgvslpdygv |
| CAR 12 - | | swirgppgkglewigviwgsettyynsslksrvtiskdnsknqvslklssvtaad |
| Soluble | | tavyycakhyyyggsyamdywgggtlvtvssggggsggggsggggseivmtgspa |
| scFv -aa | | tlslspgeratlscrasgdiskylnwyggkpgqaprlliyhtsrlhsgiparfsg |
| | | sgsgtdytltisslqpedfavyfcqqgntlpytfgqgtkleikhhhhhhhh |
| 105977 | 951 | atggccctccctgtcaccgccctgctgcttccgctggctcttctgctccacgccg |
| CAR 12 - | | ctcggcccgaaattgtgatgacccagtcacccgccactcttagcctttcacccgg |
| Full - nt | | tgagcgcgcaaccctgtcttgcagagcctcccaagacatctcaaaataccttaat |
| | | tggtatcaacagaagcccggacaggctcctcgccttctgatctaccacaccagcc |
| | | ggctccattctggaatccctgccaggttcagcggtagcggatctgggaccgacta |
| | | caccctcactatcagctcactgcagccagaggacttcgctgtctatttctgtcag |
| | | caagggaacaccctgccctacacctttggacagggcaccaagctcgagattaaag |
| | | gtggaggtggcagcggaggaggtgggtccggcggtggaggaagccaggtccaact |
| | | ccaagaaagcggaccgggtcttgtgaagccatcagaaactctttcactgacttgt |
| | | actgtgagcggagtgtctctccccgattacggggtgtcttggatcagacagccac |
| | | cggggaagggtctggaatggattggagtgatttggggctctgagactacttacta |
| | | caactcatccctcaagtcacgcgtcaccatctcaaaggacaactctaagaatcag |
| | | gtgtcactgaaactgtcatctgtgaccgcagccgacaccgccgtgtactattgcg |
| | | ctaagcattactattatggcgggagctacgcaatggattactggggacagggtac |
| | | tctggtcaccgtgtccagcaccactaccccagcaccgaggccacccaccccggct |
| | | cctaccatcgcctcccagcctctgtccctgcgtccggaggcatgtagacccgcag |
| | | ctggtggggccgtgcatacccggggtcttgacttcgcctgcgatatctacatttg |
| | | ggcccctctggctggtacttgcggggtcctgctgctttcactcgtgatcactctt |
| | | tactgtaagcgcggtcggaagaagctgctgtacatctttaagcaacccttcatga |
| | | ggcctgtgcagactactcaagaggaggacggctgttcatgccggttcccagagga |
| | | ggaggaaggcggctgcgaactgcgcgtgaaattcagccgcagcgcagatgctcca |
| | | gcctacaagcaggggcagaaccagctctacaacgaactcaatcttggtcggagag |
| | | aggagtacgacgtgctggacaagcggagaggacgggacccagaaatgggcgggaa |
| | | gccgcgcagaaagaatccccaagagggcctgtacaacgagctccaaaaggataag |
| | | atggcagaagcctatagcgagattggtatgaaaggggaacgcagaagaggcaaag |
| | | gccacgacggactgtaccagggactcagcaccgccaccaaggacacctatgacgc |
| | | tcttcacatgcaggccctgccgcctcgg |
| 105977 | 952 | MALPVTALLLPLALLLHAARPEIVMTQSPATLSLSPGERATLSCRASQDISKYLN |
| CAR 12 - | | WYQQKPGQAPRLLIYHTSRLHSGIPARFSGSGSGTDYTLTISSLQPEDFAVYFCQ |
| Full - aa | | QGNTLPYTFGQGTKLEIKGGGGSGGGGSGGGGSQVQLQESGPGLVKPSETLSLTC |
| | | TVSGVSLPDYGVSWIRQPPGKGLEWIGVIWGSETTYYNSSLKSRVTISKDNSKNQ |
| | | VSLKLSSVTAADTAVYYCAKHYYYGGSYAMDYWGQGTLVTVSSTTTPAPRPPTPA |
| | | PTIASQPLSLRPEACRPAAGGAVHTRGLDFACDIYIWAPLAGTCGVLLLSLVITL |
| | | YCKRGRKKLLYIFKQPFMRPVQTTQEEDGCSCRFPEEEEGGCELRVKFSRSADAP |
| | | AYKQGQNQLYNELNLGRREEYDVLDKRRGRDPEMGGKPRRKNPQEGLYNELQKDK |
| | | [sequence omitted] |

CTL019

| | | |
|---|---|---|
| CTL019 - | 953 | atggccctgcccgtcaccgctctgctgctgccccttgctctgcttcttcatgcag |
| Soluble | | caaggccggacatccagatgacccaaaccacctcatccctctctgcctctcttgg |
| scFv- | | agacagggtgaccatttcttgtcgcgccagccaggacatcagcaagtatctgaac |
| Histag - | | tggtatcagcagaagccggacggaaccgtgaagctcctgatctaccatacctctc |
| nt | | gcctgcatagcggcgtgccctcacgcttctctggaagcggatcaggaaccgatta |
| | | ttctctcactatttcaaatcttgagcaggaagatattgccacctatttctgccag |
| | | cagggtaataccctgccctacaccttcggaggagggaccaagctcgaaatcaccg |
| | | gtggaggaggcagcggcggtggagggtctggtggaggtggttctgaggtgaagct |
| | | gcaagaatcaggccctggacttgtggccccttcacagtccctgagcgtgacttgc |
| | | accgtgtccggagtctccctgcccgactacggagtgtcatggatcagacaacctc |
| | | cacggaaaggactggaatggctcggtgtcatctggggtagcgaaactacttacta |
| | | caattcagccctcaaaagcaggctgactattatcaaggacaacagcaagtcccaa |
| | | gtctttcttaagatgaactcactccagactgacgacaccgcaatctactattgtg |
| | | ctaagcactactactacggaggatcctacgctatggattactggggacaaggtac |
| | | ttccgtcactgtctcttcacaccatcatcaccatcaccatcac |
| CTL019 - | 954 | MALPVTALLLPLALLLHAARPdiqmtqttssisasigdrytiscrasqdiskyln |
| Soluble | | wyggkpdgtvklliyhtsrlhsgvpsrfsgsgsgtdysltisnlegediatyfcg |
| scFv- | | qgntlpytfgqgtkleitggggsggggsggggsevklgesgpglvapsgslsvtc |
| Histag - | | tvsgyslpdygvswirgpprkglewlgviwgsettyynsalksrltiikdnsksq |
| aa | | vfikmnslgtddtaiyycakhyyyggsyamdywgggtsvtvsshhhhhhhh |
| CTL019 | 955 | atggccttaccagtgaccgccttgctcctgccgctggccttgctgctccacgccg |
| Full - nt | | ccaggccggacatccagatgacacagactacatcctccctgtctgcctctctggg |
| | | agacagagtcaccatcagttgcagggcaagtcaggacattagtaaatatttaaat |
| | | tggtatcagcagaaaccagatggaactgttaaactcctgatctaccatacatcaa |
| | | gattacactcaggagtcccatcaaggttcagtggcagtgggtctggaacagatta |
| | | ttctctcaccattagcaacctggagcaagaagatattgccacttacttttgccaa |
| | | cagggtaatacgcttccgtacacgttcggaggggggaccaagctggagatcacag |
| | | gtggcggtggctcgggcggtggtgggtcgggtggcggcggatctgaggtgaaact |
| | | gcaggagtcaggacctggcctggtggcgccctcacagagcctgtccgtcacatgc |
| | | actgtctcaggggtctcattacccgactatggtgtaagctggattcgccagcctc |
| | | cacgaaagggtctggagtggctgggagtaatatggggtagtgaaaccacatacta |
| | | taattcagctctcaaatccagactgaccatcatcaaggacaactccaagagccaa |
| | | gttttcttaaaaatgaacagtctgcaaactgatgacacagccatttactactgtg |
| | | ccaaacattattactacggtggtagctatgctatggactactggggccaaggaac |
| | | ctcagtcaccgtctcctcaaccacgacgccagcgccgcgaccaccaacaccggcg |
| | | cccaccatcgcgtcgcagcccctgtccctgcgcccagaggcgtgccggccagcgg |
| | | cggggggcgcagtgcacacgagggggctggacttcgcctgtgatatctacatctg |
| | | ggcgcccttggccgggacttgtggggtccttctcctgtcactggttatcaccctt |
| | | tactgcaaacggggcagaaagaaactcctgtatatattcaaacaaccatttatga |
| | | gaccagtacaaactactcaagaggaagatggctgtagctgccgatttccagaaga |
| | | agaagaaggaggatgtgaactgagagtgaagttcagcaggagcgcagacgccccc |
| | | gcgtacaagcagggccagaaccagctctataacgagctcaatctaggacgaagag |
| | | aggagtacgatgttttggacaagagacgtggccgggaccctgagatggggggaaa |
| | | gccgagaaggaagaaccctcaggaaggcctgtacaatgaactgcagaaagataag |
| | | atggcggaggcctacagtgagattgggatgaaaggcgagcgccggaggggcaagg |
| | | ggcacgatggcctttaccagggtctcagtacagccaccaaggacacctacgacgc |
| | | ccttcacatgcaggccctgccccctcgc |
| CTL019 | 956 | MALPVTALLLPLALLLHAARPdiqmtqttssisasigdrvtiscrasqdiskyln |
| Full - aa | | wyqqkpdgtvklliyhtsrlhsgvpsrfsgsgsgtdysltisnleqediatyfcq |
| | | qgntlpytfgqgtkleitggggsggggsggggsevklqesgpglvapsqslsvtc |
| | | tvsgvslpdygvswirqpprkglewlgviwgsettyynsalksrltiikdnsksq |
| | | vflkmnslqtddtaiyycakhyyyggsyamdywgqgtsvtvsstttpaprpptpa |
| | | ptiasqplslrpeacrpaaggavhtrgldfacdiyiwaplagtcgvlllsivitl |
| | | yckrgrkkllyifkqpfmrpvqttqeedgcscrfpeeeeggcelrvkfsrsadap |
| | | aykqgqnqlynelnlgrreeydvidkrrgrdpemggkprrknpqeglynelqkdk |
| | | maeayseigmkgerrrgkghdglyggistatkdtydalhmqalppr |
| CTL019 | 957 | diqmtqttsslsaslgdrvtiscrasqdiskylnwyqqkpdgtvklliyhtsrlh |
| scFv | | sgvpsrfsgsgsgtdysltisnleqediatyfcqqgntlpytfgqgtkleitggg |
| domain | | gsggggsggggsevklqesgpglvapsqslsvtctvsgvslpdygvswirqpprk |
| | | glewlgviwgsettyynsalksrltiikdnsksqvflkmnslqtddtaiyycakh |
| | | yyyggsyamdywgqgtsvtvss |
| mCAR 1 | 2020 | QVQLLESGAELVRPGSSVKISCKASGYAFSSYWMNWVKQRPGQGLEWIGQIYPGD |
| scFv | | GDTNYNGKFKGQATLTADKSSSTAYMQLSGLTSEDSAVYSCARKTISSVVDFYFD |
| | | YWGQGTTVTGGGSGGGSGGGSGGGSELVLTQSPKFMSTSVGDRVSVTCKASQNVG |
| | | TNVAWYQQKPGQSPKPLIYSATYRNSGVPDRFTGSGSGTDFTLTITNVQSKDLAD |
| | | YFCQYNRYPYTSFFFTKLEIKRRS |
| mCAR 1 | | QVQLLESGAELVRPGSSVKISCKASGYAFSSYWMNWVKQRPGQGLEWIGQIYPGD |
| Full - aa | | GDTNYNGKFKGQATLTADKSSSTAYMQLSGLTSEDSAVYSCARKTISSVVDFYFD |
| | | YWGQGTTVTGGGSGGGSGGGSGGGSELVLTQSPKFMSTSVGDRVSVTCKASQNVG |
| | | TNVAWYQQKPGQSPKPLIYSATYRNSGVPDRFTGSGSGTDFTLTITNVQSKDLAD |
| | | YFCQYNRYPYTSFFFTKLEIKRRSKIEVMYPPPYLDNEKSNGTIIHVKGKHLCPS |
| | | PLFPGPSKPFWVLVVVGGVLACYSLLVTVAFIIFWVRSKRSRLLHSDYMNMTPRR |
| | | PGPTRKHYQPYAPPRDFAAYRSRVKFSRSADAPAYQQGQNQLYNELNLGRREEYD |
| | | VLDKRRGRDPEMGGKPRRKNPQEGLYNELQKDKMAEAYSEIGMKGERRRGKGHDG |
| | | LYQGLSTATKDTYDALHMQALPPR |
| mCAR 2 | 2021 | DIQMTQTTSSLSASLGDRVTISCRASQDISKYLNWYQQKPDGTVKLLIYHTSRLH |
| scFv | | SGVPSRFSGSGSGTDYSLTISNLEQEDIATYFCQQGNTLPYTFGQGTKLEITGST |
| | | SGSGKPGSGEGSTKGEVKLQESGPGLVAPSQSLSVTCTVSGVSLPDYGVSWIRQP |
| | | PRKGLEWLGVIWGSETTYYNSALKSRLTIIKDNSKSQVFLKMNSLQTDDTAIYYC |
| | | AKHYYYGGSYAMDYWGQGTSVTVSSE |
| mCAR 2 | | DIQMTQTTSSLSASLGDRVTISCRASQDISKYLNWYQQKPDGTVKLLIYHTSRLH |
| CAR - aa | | SGVPSRFSGSGSGTDYSLTISNLEQEDIATYFCQQGNTLPYTFGQGTKLEITGST |
| | | SGSGKPGSGEGSTKGEVKLQESGPGLVAPSQSLSVTCTVSGVSLPDYGVSWIRQP |
| | | PRKGLEWLGVIWGSETTYYNSALKSRLTIIKDNSKSQVFLKMNSLQTDDTAIYYC |
| | | AKHYYYGGSYAMDYWGQGTSVTVSSESKYGPPCPPCPMFWVLVVVGGVLACYSLL |
| | | VTVAFIIFWVKRGRKKLLYIFKQPFMRPVQTTQEEDGCSCRFEEEEGGCELRVKF |
| | | SRSADAPAYQQGQNQLYNELNLGRREEYDVLDKRRGRDPEMGGKPRRKNPQEGLY |
| | | NELQKDKMAEAYSEIGMKGERRRGKGHDGLYQGLSTATKDTYDALHMQALPPRL |
| mCAR 2 | | DIQMTQTT SSLSASLGDR VTISCRASQD ISKYLNWYQQ KPDGTVKLLI |
| Full - aa | | YHTSRLHSGV PSRFSGSGSG TDYSLTISNL EQEDIATYFC QQGNTLPYTF |
| | | GGGTKLEITG STSGSGKPGS GEGSTKGEVK LQESGPGLVA PSQSLSVTCT |
| | | VSGVSLPDYG VSWIRQPPRK GLEWLGVIWG SETTYYNSAL KSRLTIIKDN |
| | | SKSQVFLKMN SLQTDDTAIY YCAKHYYYGG SYAMDYWGQG TSVTVSSESK |
| | | YGPPCPPCPM FWVLVVVGGV LACYSLLVTV |
| | | AFIIFWVKRG RKKLLYIFKQ PFMRPVQTTQ EEDGCSCRFE EEEGGCELRV |
| | | KFSRSADAPA YQQGQNQLYN ELNLGRREEY DVLDKRRGRD PEMGGKPRRK |
| | | NPQEGLYNEL QKDKMAEAYS EIGMKGERRR GKGHDGLYQG LSTATKDTYD |
| | | ALHMQALPPR LEGGGEGRGS LLTCGDVEEN PGPRMLLLVT SLLLCELPHP |
| | | AFLLIPRKVC NGIGIGEFKD SLSINATNIK HFKNCTSISG DLHILPVAFR |
| | | GDSFTHTPPL DPQELDILKT VKEITGFLLI QAWPENRTDL HAFENLEIIR |
| | | GRTKQHGQFS LAVVSLNITS LGLRSLKEIS DGDVIISGNK NLCYANTINW |
| | | KKLFGTSGQK TKIISNRGEN SCKATGQVCH ALCSPEGCWG PEPRDCVSCR |
| | | NVSRGRECVD KCNLLEGEPR EFVENSECIQ CHPECLPQAM NITCTGRGPD |
| | | NCIQCAHYID GPHCVKTCPA GVMGENNTLV WKYADAGHVC HLCHPNCTYG |
| | | CTGPGLEGCP TNGPKIPSIA TGMVGALLLL LVVALGIGLF M |
| mCAR 3 | 2022 | DIQMTQTTSSLSASLGDRVTISCRASQDISKYLNWYQQKPDGTVKLLIYHTSRLH |
| scFv | | SGVPSRFSGSGSGTDYSLTISNLEQEDIATYFCQQGNTLPYTFGGGTKLEITGST |
| | | SGSGKPGSGEGSTKGEVKLQESGPGLVAPSQSLSVTCTVSGVSLPDYGVSWIRQP |
| | | PRKGLEWLGVIWGSETTYYNSALKSRLTIIKDNSKSQVFLKMNSLQTDDTAIYYC |
| | | AKHYYYGGSYAMDYWGQGTSVTVSS |
| mCAR 3 | | DIQMTQTTSSLSASLGDRVTISCRASQDISKYLNWYQQKPDGTVKLLIYHTSRLH |
| Full - aa | | SGVPSRFSGSGSGTDYSLTISNLEQEDIATYFCQQGNTLPYTFGGGTKLEITGST |
| | | SGSGKPGSGEGSTKGEVKLQESGPGLVAPSQSLSVTCTVSGVSLPDYGVSWIRQP |
| | | PRKGLEWLGVIWGSETTYYNSALKSRLTIIKDNSKSQVFLKMNSLQTDDTAIYYC |
| | | AKHYYYGGSYAMDYWGQGTSVTVSSAAAIEVMYPPPYLDNEKSNGTIIHVKGKHL |
| | | CPSPLFPGPSKPFWVLVVVGGVLACYSLLVTVAFIIFWVRSKRSRLLHSDYMNMT |
| | | PRRPGPTRKHYQPYAPPRDFAAYRSRVKFSRSADAPAYQQGQNQLYNELNLGRRE |
| | | EYDVLDKRRGRDPEMGGKPRRKNPQEGLYNELQKDKMAEAYSEIGMKGERRRGKG |
| | | HDGLYQGLSTATKDTYDALHMQALPPR |
| SSJ25-C1 | | QVQLLESGAELVRPGSSVKISCKASGYAFSSYWMNWVKQRPGQGLEWIGQIYPGD |
| VH | | GDTNYNGKFKGQATLTADKSSSTAYMQLSGLTSEDSAVYSCARKTISSVVDFYFD |
| sequence | | YWGQGTTVT |
| SSJ25-C1 | | ELVLTQSPKFMSTSVGDRVSVTCKASQNVGTNVAWYQQKPGQSPKPLIYSATYRN |
| VL | | SGVPDRFTGSGSGTDFTLTITNVQSKDLADYFYFCQYNRYPYTSGGGTKLEIKRR |
| sequence | | S |

[0696] In some embodiments, the CD19 CAR or binding domain includes the amino acid sequence of CTL019, or is encoded by the nucleotide sequence of CTL019 according to Table 3 with or without the leader sequence or the his tag, or a sequence substantially identical thereto (e.g., at least 85%, 90%, 95% or higher identity).

[0697] In some embodiments, the CDRs are defined according to the Kabat numbering scheme, the Chothia numbering scheme, or a combination thereof.

[0698] The sequences of humanized CDR sequences of the scFv domains are shown in Table 4A for the heavy chain variable domains and in Table 4B for the light chain variable domains. “ID” stands for the respective SEQ ID NO for each CDR.

TABLE 4A
Heavy Chain Variable Domain CDRs (according to Kabat)

| | | | SEQ | | SEQ | | SEQ |
|---|---|---|---|---|---|---|---|
| Candidate | FW | HCDR1 | ID | HCDR2 | ID | HCDR3 | ID |
| murine_CART19 | | DYGVS | 958 | VIWGSETTYYNSALKS | 959 | HYYYGGSYAMDY | 960 |
| humanized_CART19 a | VH4 | DYGVS | 958 | VIWGSETTYYSSSLKS | 961 | HYYYGGSYAMDY | 960 |
| humanized_CART19 b | VH4 | DYGVS | 958 | VIWGSETTYYQSSLKS | 962 | HYYYGGSYAMDY | 960 |
| humanized_CART19 c | VH4 | DYGVS | 958 | VIWGSETTYYNSSKKS | 963 | HYYYGGSYAMDY | 960 |

TABLE 4B
Light Chain Variable Domain CDRs (according to Kabat)

| | | | SEQ | | SEQ | | SEQ |
|---|---|---|---|---|---|---|---|
| Candidate | FW | LCDR1 | ID | LCDR2 | ID | LCDR3 | ID |
| murine_CART19 | | RASQDISKYLN | 964 | HTSRLHS | 965 | QQGNTLPYT | 966 |
| humanized_CART19 a | VK3 | RASQDISKYLN | 964 | HTSRLHS | 965 | QQGNTLPYT | 966 |
| humanized_CART19 b | VK3 | RASQDISKYLN | 964 | HTSRLHS | 965 | QQGNTLPYT | 966 |
| humanized_CART19 c | VK3 | RASQDISKYLN | 964 | HTSRLHS | 965 | QQGNTLPYT | 966 |

[0699] In one embodiment, the CAR molecule comprises a BCMA CAR molecule described herein, e.g., a BCMA CAR described in US-2016-0046724-A1 or WO2016/014565. In embodiments, the BCMA CAR comprises an amino acid, or has a nucleotide sequence of a CAR molecule, or an antigen binding domain according to US-2016-0046724-A1, or Table 1 or 16, SEQ ID NO: 271 or SEQ ID NO: 273 of WO2016/014565, incorporated herein by reference, or a sequence substantially identical to any of the aforesaid sequences (e.g., at least 85%, 90%, 95% or more identical to any of the aforesaid BCMA CAR sequences). The amino acid and nucleotide sequences encoding the BCMA CAR molecules and antigen binding domains (e.g., including one, two, three VH CDRs; and one, two, three VL CDRs according to Kabat or Chothia), are specified in WO2016/014565.

### BCMA CAR

[0700] In embodiments, the BCMA CAR comprises an anti-BCMA binding domain (e.g., human or humanized anti-BCMA binding domain), a transmembrane domain, and an intracellular signaling domain, and wherein said anti-BCMA binding domain comprises a heavy chain complementary determining region 1 (HC CDR1), a heavy chain complementary determining region 2 (HC CDR2), and a heavy chain complementary determining region 3 (HC CDR3) of any anti-BMCA heavy chain binding domain amino acid sequences listed in Table 5 or 6, or a sequence at least 85%, 90%, 95% or more identical thereto (e.g., having less than 5, 4, 3, 2 or 1 amino acid substitutions, e.g., conservative substitutions).

[0701] In one embodiment, the anti-BCMA binding domain comprises a light chain variable region described herein (e.g., in Table 5 or 6) and/or a heavy chain variable region described herein (e.g., in Table 5 or 6), or a sequence at least 85%, 90%, 95% or more identical thereto.

[0702] In one embodiment, the encoded anti-BCMA binding domain is a scFv comprising a light chain and a heavy chain of an amino acid sequence of Table 5 or 6.

[0703] In an embodiment, the human or humanized anti-BCMA binding domain (e.g., an scFv) comprises: a light chain variable region comprising an amino acid sequence having at least one, two or three modifications (e.g., substitutions, e.g., conservative substitutions) but not more than 30, 20 or 10 modifications (e.g., substitutions, e.g., conservative substitutions) of an amino acid sequence of a light chain variable region provided in Table 5 or 6, or a sequence at least 85%, 90%, 95% or more identical thereto; and/or a heavy chain variable region comprising an amino acid sequence having at least one, two or three modifications (e.g., substitutions, e.g., conservative substitutions) but not more than 30, 20 or 10 modifications (e.g., substitutions, e.g., conservative substitutions) of an amino acid sequence of a heavy chain variable region provided in Table 5 or 6, or a sequence at least 85%, 90%, 95% or more identical thereto.

TABLE 5
Amino Acid and Nucleic Acid Sequences of exemplary anti-BCMA scFv domains
and BCMA CAR molecules

| | | |
|---|---|---|
| | SEQ | |
| Name/ | ID | |
| Description | NO: | Sequence |

139109

| | | |
|---|---|---|
| 139109- aa | 967 | EVQLVESGGGLVQPGGSLRLSCAVSGFALSNHGMSWVRRAPGKGLEWVSGIVY |
| ScFv domain | | SGSTYYAASVKGRFTISRDNSRNTLYLQMNSLRPEDTAIYYCSAHGGESDVWG |
| | | QGTTVTVSSASGGGGSGGRASGGGGSDIQLTQSPSSLSASVGDRVTITCRASQ |
| | | SISSYLNWYQQKPGKAPKLLIYAASSLQSGVPSRFSGSGSGTDFTLTISSLQP |
| | | EDFATYYCQQSYSTPYTFGQGTKVEIK |
| 139109- nt | 968 | GAAGTGCAATTGGTGGAATCAGGGGGAGGACTTGTGCAGCCTGGAGGATCGCT |
| ScFv domain | | GAGACTGTCATGTGCCGTGTCCGGCTTTGCCCTGTCCAACCACGGGATGTCCT |
| | | GGGTCCGCCGCGCGCCTGGAAAGGGCCTCGAATGGGTGTCGGGTATTGTGTAC |
| | | AGCGGTAGCACCTACTATGCCGCATCCGTGAAGGGGAGATTCACCATCAGCCG |
| | | GGACAACTCCAGGAACACTCTGTACCTCCAAATGAATTCGCTGAGGCCAGAGG |
| | | ACACTGCCATCTACTACTGCTCCGCGCATGGCGGAGAGTCCGACGTCTGGGGA |
| | | CAGGGGACCACCGTGACCGTGTCTAGCGCGTCCGGCGGAGGCGGCAGCGGGGG |
| | | TCGGGCATCAGGGGGCGGCGGATCGGACATCCAGCTCACCCAGTCCCCGAGCT |
| | | CGCTGTCCGCCTCCGTGGGAGATCGGGTCACCATCACGTGCCGCGCCAGCCAG |
| | | TCGATTTCCTCCTACCTGAACTGGTACCAACAGAAGCCCGGAAAAGCCCCGAA |
| | | GCTTCTCATCTACGCCGCCTCGAGCCTGCAGTCAGGAGTGCCCTCACGGTTCT |
| | | CCGGCTCCGGTTCCGGTACTGATTTCACCCTGACCATTTCCTCCCTGCAACCG |
| | | GAGGACTTCGCTACTTACTACTGCCAGCAGTCGTACTCCACCCCCTACACTTT |
| | | CGGACAAGGCACCAAGGTCGAAATCAAG |
| 139109- aa | 969 | EVQLVESGGGLVQPGGSLRLSCAVSGFALSNHGMSWVRRAPGKGLEWVSGIVY |
| VH | | SGSTYYAASVKGRFTISRDNSRNTLYLQMNSLRPEDTAIYYCSAHGGESDVWG |
| | | QGTTVTVSS |
| 139109- aa | 970 | DIQLTQSPSSLSASVGDRVTITCRASQSISSYLNWYQQKPGKAPKLLIYAASS |
| VL | | LQSGVPSRFSGSGSGTDFTLTISSLQPEDFATYYCQQSYSTPYTFGQGTKVEI |
| | | K |
| 139109- aa | 971 | MALPVTALLLPLALLLHAARPEVQLVESGGGLVQPGGSLRLSCAVSGFALSNH |
| Full CAR | | GMSWVRRAPGKGLEWVSGIVYSGSTYYAASVKGRFTISRDNSRNTLYLQMNSL |
| | | RPEDTAIYYCSAHGGESDVWGQGTTVTVSSASGGGGSGGRASGGGGSDIQLTQ |
| | | SPSSLSASVGDRVTITCRASQSISSYLNWYQQKPGKAPKLLIYAASSLQSGVP |
| | | SRFSGSGSGTDFTLTISSLQPEDFATYYCQQSYSTPYTFGQGTKVEIKTTTPA |
| | | PRPPTPAPTIASQPLSLRPEACRPAAGGAVHTRGLDFACDIYIWAPLAGTCGV |
| | | LLLSLVITLYCKRGRKKLLYIFKQPFMRPVQTTQEEDGCSCRFPEEEEGGCEL |
| | | RVKFSRSADAPAYKQGQNQLYNELNLGRREEYDVLDKRRGRDPEMGGKPRRKN |
| | | PQEGLYNELQKDKMAEAYSEIGMKGERRRGKGHDGLYQGLSTATKDTYDALHM |
| | | QALPPR |
| 139109- nt | 972 | ATGGCCCTCCCTGTCACCGCCCTGCTGCTTCCGCTGGCTCTTCTGCTCCACGC |
| Full CAR | | CGCTCGGCCCGAAGTGCAATTGGTGGAATCAGGGGGAGGACTTGTGCAGCCTG |
| | | GAGGATCGCTGAGACTGTCATGTGCCGTGTCCGGCTTTGCCCTGTCCAACCAC |
| | | GGGATGTCCTGGGTCCGCCGCGCGCCTGGAAAGGGCCTCGAATGGGTGTCGGG |
| | | TATTGTGTACAGCGGTAGCACCTACTATGCCGCATCCGTGAAGGGGAGATTCA |
| | | CCATCAGCCGGGACAACTCCAGGAACACTCTGTACCTCCAAATGAATTCGCTG |
| | | AGGCCAGAGGACACTGCCATCTACTACTGCTCCGCGCATGGCGGAGAGTCCGA |
| | | CGTCTGGGGACAGGGGACCACCGTGACCGTGTCTAGCGCGTCCGGCGGAGGCG |
| | | GCAGCGGGGGTCGGGCATCAGGGGGCGGCGGATCGGACATCCAGCTCACCCAG |
| | | TCCCCGAGCTCGCTGTCCGCCTCCGTGGGAGATCGGGTCACCATCACGTGCCG |
| | | CGCCAGCCAGTCGATTTCCTCCTACCTGAACTGGTACCAACAGAAGCCCGGAA |
| | | AAGCCCCGAAGCTTCTCATCTACGCCGCCTCGAGCCTGCAGTCAGGAGTGCCC |
| | | TCACGGTTCTCCGGCTCCGGTTCCGGTACTGATTTCACCCTGACCATTTCCTC |
| | | CCTGCAACCGGAGGACTTCGCTACTTACTACTGCCAGCAGTCGTACTCCACCC |
| | | CCTACACTTTCGGACAAGGCACCAAGGTCGAAATCAAGACCACTACCCCAGCA |
| | | CCGAGGCCACCCACCCCGGCTCCTACCATCGCCTCCCAGCCTCTGTCCCTGCG |
| | | TCCGGAGGCATGTAGACCCGCAGCTGGTGGGGCCGTGCATACCCGGGGTCTTG |
| | | ACTTCGCCTGCGATATCTACATTTGGGCCCCTCTGGCTGGTACTTGCGGGGTC |
| | | CTGCTGCTTTCACTCGTGATCACTCTTTACTGTAAGCGCGGTCGGAAGAAGCT |
| | | GCTGTACATCTTTAAGCAACCCTTCATGAGGCCTGTGCAGACTACTCAAGAGG |
| | | AGGACGGCTGTTCATGCCGGTTCCCAGAGGAGGAGGAAGGCGGCTGCGAACTG |
| | | CGCGTGAAATTCAGCCGCAGCGCAGATGCTCCAGCCTACAAGCAGGGGCAGAA |
| | | CCAGCTCTACAACGAACTCAATCTTGGTCGGAGAGAGGAGTACGACGTGCTGG |
| | | ACAAGCGGAGAGGACGGGACCCAGAAATGGGCGGGAAGCCGCGCAGAAAGAAT |
| | | CCCCAAGAGGGCCTGTACAACGAGCTCCAAAAGGATAAGATGGCAGAAGCCTA |
| | | TAGCGAGATTGGTATGAAAGGGGAACGCAGAAGAGGCAAAGGCCACGACGGAC |
| | | TGTACCAGGGACTCAGCACCGCCACCAAGGACACCTATGACGCTCTTCACATG |
| | | CAGGCCCTGCCGCCTCGG |

139103

| | | |
|---|---|---|
| 139103- aa | 973 | QVQLVESGGGLVQPGRSLRLSCAASGFTFSNYAMSWVRQAPGKGLGWVSGISR |
| ScFv domain | | SGENTYYADSVKGRFTISRDNSKNTLYLQMNSLRDEDTAVYYCARSPAHYYGG |
| | | MDVWGQGTTVTVSSASGGGGSGGRASGGGGSDIVLTQSPGTLSLSPGERATLS |
| | | CRASQSISSSFLAWYQQKPGQAPRLLIYGASRRATGIPDRFSGSGSGTDFTLT |
| | | ISRLEPEDSAVYYCQQYHSSPSWTFGQGTKLEIK |
| 139103- nt | 974 | CAAGTGCAACTCGTGGAATCTGGTGGAGGACTCGTGCAACCCGGAAGATCGCT |
| ScFv domain | | TAGACTGTCGTGTGCCGCCAGCGGGTTCACTTTCTCGAACTACGCGATGTCCT |
| | | GGGTCCGCCAGGCACCCGGAAAGGGACTCGGTTGGGTGTCCGGCATTTCCCGG |
| | | TCCGGCGAAAATACCTACTACGCCGACTCCGTGAAGGGCCGCTTCACCATCTC |
| | | AAGGGACAACAGCAAAAACACCCTGTACTTGCAAATGAACTCCCTGCGGGATG |
| | | AAGATACAGCCGTGTACTATTGCGCCCGGTCGCCTGCCCATTACTACGGCGGA |
| | | ATGGACGTCTGGGGACAGGGAACCACTGTGACTGTCAGCAGCGCGTCGGGTGG |
| | | CGGCGGCTCAGGGGGTCGGGCCTCCGGGGGGGGAGGGTCCGACATCGTGCTGA |
| | | CCCAGTCCCCGGGAACCCTGAGCCTGAGCCCGGGAGAGCGCGCGACCCTGTCA |
| | | TGCCGGGCATCCCAGAGCATTAGCTCCTCCTTTCTCGCCTGGTATCAGCAGAA |
| | | GCCCGGACAGGCCCCGAGGCTGCTGATCTACGGCGCTAGCAGAAGGGCTACCG |
| | | GAATCCCAGACCGGTTCTCCGGCTCCGGTTCCGGGACCGATTTCACCCTTACT |
| | | ATCTCGCGCCTGGAACCTGAGGACTCCGCCGTCTACTACTGCCAGCAGTACCA |
| | | CTCATCCCCGTCGTGGACGTTCGGACAGGGCACCAAGCTGGAGATTAAG |
| 139103- aa | 975 | QVQLVESGGGLVQPGRSLRLSCAASGFTFSNYAMSWVRQAPGKGLGWVSGISR |
| VH | | SGENTYYADSVKGRFTISRDNSKNTLYLQMNSLRDEDTAVYYCARSPAHYYGG |
| | | MDVWGQGTTVTVSS |
| 139103- aa | 976 | DIVLTQSPGTLSLSPGERATLSCRASQSISSSFLAWYQQKPGQAPRLLIYGAS |
| VL | | RRATGIPDRFSGSGSGTDFTLTISRLEPEDSAVYYCQQYHSSPSWTFGQGTKL |
| | | EIK |
| 139103- aa | 977 | MALPVTALLLPLALLLHAARPQVQLVESGGGLVQPGRSLRLSCAASGFTFSNY |
| Full CAR | | AMSWVRQAPGKGLGWVSGISRSGENTYYADSVKGRFTISRDNSKNTLYLQMNS |
| | | LRDEDTAVYYCARSPAHYYGGMDVWGQGTTVTVSSASGGGGSGGRASGGGGSD |
| | | IVLTQSPGTLSLSPGERATLSCRASQSISSSFLAWYQQKPGQAPRLLIYGASR |
| | | RATGIPDRFSGSGSGTDFTLTISRLEPEDSAVYYCQQYHSSPSWTFGQGTKLE |
| | | IKTTTPAPRPPTPAPTIASQPLSLRPEACRPAAGGAVHTRGLDFACDIYIWAP |
| | | LAGTCGVLLLSLVITLYCKRGRKKLLYIFKQPFMRPVQTTQEEDGCSCRFPEE |
| | | EEGGCELRVKFSRSADAPAYKQGQNQLYNELNLGRREEYDVLDKRRGRDPEMG |
| | | GKPRRKNPQEGLYNELQKDKMAEAYSEIGMKGERRRGKGHDGLYQGLSTATKD |
| | | TYDALHMQALPPR |
| 139103- nt | 978 | ATGGCCCTCCCTGTCACCGCCCTGCTGCTTCCGCTGGCTCTTCTGCTCCACGC |
| Full CAR | | CGCTCGGCCCCAAGTGCAACTCGTGGAATCTGGTGGAGGACTCGTGCAACCCG |
| | | GAAGATCGCTTAGACTGTCGTGTGCCGCCAGCGGGTTCACTTTCTCGAACTAC |
| | | GCGATGTCCTGGGTCCGCCAGGCACCCGGAAAGGGACTCGGTTGGGTGTCCGG |
| | | CATTTCCCGGTCCGGCGAAAATACCTACTACGCCGACTCCGTGAAGGGCCGCT |
| | | TCACCATCTCAAGGGACAACAGCAAAAACACCCTGTACTTGCAAATGAACTCC |
| | | CTGCGGGATGAAGATACAGCCGTGTACTATTGCGCCCGGTCGCCTGCCCATTA |
| | | CTACGGCGGAATGGACGTCTGGGGACAGGGAACCACTGTGACTGTCAGCAGCG |
| | | CGTCGGGTGGCGGCGGCTCAGGGGGTCGGGCCTCCGGGGGGGGAGGGTCCGAC |
| | | ATCGTGCTGACCCAGTCCCCGGGAACCCTGAGCCTGAGCCCGGGAGAGCGCGC |
| | | GACCCTGTCATGCCGGGCATCCCAGAGCATTAGCTCCTCCTTTCTCGCCTGGT |
| | | ATCAGCAGAAGCCCGGACAGGCCCCGAGGCTGCTGATCTACGGCGCTAGCAGA |
| | | AGGGCTACCGGAATCCCAGACCGGTTCTCCGGCTCCGGTTCCGGGACCGATTT |
| | | CACCCTTACTATCTCGCGCCTGGAACCTGAGGACTCCGCCGTCTACTACTGCC |
| | | AGCAGTACCACTCATCCCCGTCGTGGACGTTCGGACAGGGCACCAAGCTGGAG |
| | | ATTAAGACCACTACCCCAGCACCGAGGCCACCCACCCCGGCTCCTACCATCGC |
| | | CTCCCAGCCTCTGTCCCTGCGTCCGGAGGCATGTAGACCCGCAGCTGGTGGGG |
| | | CCGTGCATACCCGGGGTCTTGACTTCGCCTGCGATATCTACATTTGGGCCCCT |
| | | CTGGCTGGTACTTGCGGGGTCCTGCTGCTTTCACTCGTGATCACTCTTTACTG |
| | | TAAGCGCGGTCGGAAGAAGCTGCTGTACATCTTTAAGCAACCCTTCATGAGGC |
| | | CTGTGCAGACTACTCAAGAGGAGGACGGCTGTTCATGCCGGTTCCCAGAGGAG |
| | | GAGGAAGGCGGCTGCGAACTGCGCGTGAAATTCAGCCGCAGCGCAGATGCTCC |
| | | AGCCTACAAGCAGGGGCAGAACCAGCTCTACAACGAACTCAATCTTGGTCGGA |
| | | GAGAGGAGTACGACGTGCTGGACAAGCGGAGAGGACGGGACCCAGAAATGGGC |
| | | GGGAAGCCGCGCAGAAAGAATCCCCAAGAGGGCCTGTACAACGAGCTCCAAAA |
| | | GGATAAGATGGCAGAAGCCTATAGCGAGATTGGTATGAAAGGGGAACGCAGAA |
| | | GAGGCAAAGGCCACGACGGACTGTACCAGGGACTCAGCACCGCCACCAAGGAC |
| | | ACCTATGACGCTCTTCACATGCAGGCCCTGCCGCCTCGG |

139105

| | | |
|---|---|---|
| 139105- aa | 979 | QVQLVESGGGLVQPGRSLRLSCAASGFTFDDYAMHWVRQAPGKGLEWVSGISW |
| ScFv domain | | NSGSIGYADSVKGRFTISRDNAKNSLYLQMNSLRAEDTALYYCSVHSFLAYWG |
| | | QGTLVTVSSASGGGGSGGRASGGGGSDIVMTQTPLSLPVTPGEPASISCRSSQ |
| | | SLLHSNGYNYLDWYLQKPGQSPQLLIYLGSNRASGVPDRFSGSGSGTDFTLKI |
| | | SRVEAEDVGVYYCMQALQTPYTFGQGTKVE1K |
| 139105- nt | 980 | CAAGTGCAACTCGTCGAATCCGGTGGAGGTCTGGTCCAACCTGGTAGAAGCCT |
| ScFv domain | | GAGACTGTCGTGTGCGGCCAGCGGATTCACCTTTGATGACTATGCTATGCACT |
| | | GGGTGCGGCAGGCCCCAGGAAAGGGCCTGGAATGGGTGTCGGGAATTAGCTGG |
| | | AACTCCGGGTCCATTGGCTACGCCGACTCCGTGAAGGGCCGCTTCACCATCTC |
| | | CCGCGACAACGCAAAGAACTCCCTGTACTTGCAAATGAACTCGCTCAGGGCTG |
| | | AGGATACCGCGCTGTACTACTGCTCCGTGCATTCCTTCCTGGCCTACTGGGGA |
| | | CAGGGAACTCTGGTCACCGTGTCGAGCGCCTCCGGCGGCGGGGGCTCGGGTGG |
| | | ACGGGCCTCGGGCGGAGGGGGGTCCGACATCGTGATGACCCAGACCCCGCTGA |
| | | GCTTGCCCGTGACTCCCGGAGAGCCTGCATCCATCTCCTGCCGGTCATCCCAG |
| | | TCCCTTCTCCACTCCAACGGATACAACTACCTCGACTGGTACCTCCAGAAGCC |
| | | GGGACAGAGCCCTCAGCTTCTGATCTACCTGGGGTCAAATAGAGCCTCAGGAG |
| | | TGCCGGATCGGTTCAGCGGATCTGGTTCGGGAACTGATTTCACTCTGAAGATT |
| | | TCCCGCGTGGAAGCCGAGGACGTGGGCGTCTACTACTGTATGCAGGCGCTGCA |
| | | GACCCCCTATACCTTCGGCCAAGGGACGAAAGTGGAGATCAAG |
| 139105- aa | 981 | QVQLVESGGGLVQPGRSLRLSCAASGFTFDDYAMHWVRQAPGKGLEWVSGISW |
| VH | | NSGSIGYADSVKGRFTISRDNAKNSLYLQMNSLRAEDTALYYCSVHSFLAYWG |
| | | QGTLVTVSS |
| 139105- aa | 982 | DIVMTQTPLSLPVTPGEPASISCRSSQSLLHSNGYNYLDWYLQKPGQSPQLLI |
| VL | | YLGSNRASGVPDRFSGSGSGTDFTLKISRVEAEDVGVYYCMQALQTPYTFGQG |
| | | TKVEIK |
| 139105- aa | 983 | MALPVTALLLPLALLLHAARPQVQLVESGGGLVQPGRSLRLSCAASGFTFDDY |
| Full CAR | | AMHWVRQAPGKGLEWVSGISWNSGSIGYADSVKGRFTISRDNAKNSLYLQMNS |
| | | LRAEDTALYYCSVHSFLAYWGQGTLVTVSSASGGGGSGGRASGGGGSDIVMTQ |
| | | TPLSLPVTPGEPASISCRSSQSLLHSNGYNYLDWYLQKPGQSPQLLIYLGSNR |
| | | ASGVPDRFSGSGSGTDFTLKISRVEAEDVGVYYCMQALQTPYTFGQGTKVEIK |
| | | TTTPAPRPPTPAPTIASQPLSLRPEACRPAAGGAVHTRGLDFACDIYIWAPLA |
| | | GTCGVLLLSLVITLYCKRGRKKLLYIFKQPFMRPVQTTQEEDGCSCRFPEEEE |
| | | GGCELRVKFSRSADAPAYKQGQNQLYNELNLGRREEYDVLDKRRGRDPEMGGK |
| | | PRRKNPQEGLYNELQKDKMAEAYSEIGMKGERRRGKGHDGLYQGLSTATKDTY |
| | | DALHMQALPPR |
| 139105- nt | 984 | ATGGCCCTCCCTGTCACCGCCCTGCTGCTTCCGCTGGCTCTTCTGCTCCACGC |
| Full CAR | | CGCTCGGCCCCAAGTGCAACTCGTCGAATCCGGTGGAGGTCTGGTCCAACCTG |
| | | GTAGAAGCCTGAGACTGTCGTGTGCGGCCAGCGGATTCACCTTTGATGACTAT |
| | | GCTATGCACTGGGTGCGGCAGGCCCCAGGAAAGGGCCTGGAATGGGTGTCGGG |
| | | AATTAGCTGGAACTCCGGGTCCATTGGCTACGCCGACTCCGTGAAGGGCCGCT |
| | | TCACCATCTCCCGCGACAACGCAAAGAACTCCCTGTACTTGCAAATGAACTCG |
| | | CTCAGGGCTGAGGATACCGCGCTGTACTACTGCTCCGTGCATTCCTTCCTGGC |
| | | CTACTGGGGACAGGGAACTCTGGTCACCGTGTCGAGCGCCTCCGGCGGCGGGG |
| | | GCTCGGGTGGACGGGCCTCGGGCGGAGGGGGGTCCGACATCGTGATGACCCAG |
| | | ACCCCGCTGAGCTTGCCCGTGACTCCCGGAGAGCCTGCATCCATCTCCTGCCG |
| | | GTCATCCCAGTCCCTTCTCCACTCCAACGGATACAACTACCTCGACTGGTACC |
| | | TCCAGAAGCCGGGACAGAGCCCTCAGCTTCTGATCTACCTGGGGTCAAATAGA |
| | | GCCTCAGGAGTGCCGGATCGGTTCAGCGGATCTGGTTCGGGAACTGATTTCAC |
| | | TCTGAAGATTTCCCGCGTGGAAGCCGAGGACGTGGGCGTCTACTACTGTATGC |
| | | AGGCGCTGCAGACCCCCTATACCTTCGGCCAAGGGACGAAAGTGGAGATCAAG |
| | | ACCACTACCCCAGCACCGAGGCCACCCACCCCGGCTCCTACCATCGCCTCCCA |
| | | GCCTCTGTCCCTGCGTCCGGAGGCATGTAGACCCGCAGCTGGTGGGGCCGTGC |
| | | ATACCCGGGGTCTTGACTTCGCCTGCGATATCTACATTTGGGCCCCTCTGGCT |
| | | GGTACTTGCGGGGTCCTGCTGCTTTCACTCGTGATCACTCTTTACTGTAAGCG |
| | | CGGTCGGAAGAAGCTGCTGTACATCTTTAAGCAACCCTTCATGAGGCCTGTGC |
| | | AGACTACTCAAGAGGAGGACGGCTGTTCATGCCGGTTCCCAGAGGAGGAGGAA |
| | | GGCGGCTGCGAACTGCGCGTGAAATTCAGCCGCAGCGCAGATGCTCCAGCCTA |
| | | CAAGCAGGGGCAGAACCAGCTCTACAACGAACTCAATCTTGGTCGGAGAGAGG |
| | | AGTACGACGTGCTGGACAAGCGGAGAGGACGGGACCCAGAAATGGGCGGGAAG |
| | | CCGCGCAGAAAGAATCCCCAAGAGGGCCTGTACAACGAGCTCCAAAAGGATAA |
| | | GATGGCAGAAGCCTATAGCGAGATTGGTATGAAAGGGGAACGCAGAAGAGGCA |
| | | AAGGCCACGACGGACTGTACCAGGGACTCAGCACCGCCACCAAGGACACCTAT |
| | | GACGCTCTTCACATGCAGGCCCTGCCGCCTCGG |

139111

| | | |
|---|---|---|
| 139111- aa | 985 | EVQLLESGGGLVQPGGSLRLSCAVSGFALSNHGMSWVRRAPGKGLEWVSGIVY |
| ScFv domain | | SGSTYYAASVKGRFTISRDNSRNTLYLQMNSLRPEDTAIYYCSAHGGESDVWG |
| | | QGTTVTVSSASGGGGSGGRASGGGGSDIVMTQTPLSLSVTPGQPASISCKSSQ |
| | | SLLRNDGKTPLYWYLQKAGQPPQLLIYEVSNRFSGVPDRFSGSGSGTDFTLKI |
| | | SRVEAEDVGAYYCMQNIQFPSFGGGTKLEIK |
| 139111- nt | 986 | GAAGTGCAATTGTTGGAATCTGGAGGAGGACTTGTGCAGCCTGGAGGATCACT |
| ScFv domain | | GAGACTTTCGTGTGCGGTGTCAGGCTTCGCCCTGAGCAACCACGGCATGAGCT |
| | | GGGTGCGGAGAGCCCCGGGGAAGGGTCTGGAATGGGTGTCCGGGATCGTCTAC |
| | | TCCGGTTCAACTTACTACGCCGCAAGCGTGAAGGGTCGCTTCACCATTTCCCG |
| | | CGATAACTCCCGGAACACCCTGTACCTCCAAATGAACTCCCTGCGGCCCGAGG |
| | | ACACCGCCATCTACTACTGTTCCGCGCATGGAGGAGAGTCCGATGTCTGGGGA |
| | | CAGGGCACTACCGTGACCGTGTCGAGCGCCTCGGGGGGAGGAGGCTCCGGCGG |
| | | TCGCGCCTCCGGGGGGGGTGGCAGCGACATTGTGATGACGCAGACTCCACTCT |
| | | CGCTGTCCGTGACCCCGGGACAGCCCGCGTCCATCTCGTGCAAGAGCTCCCAG |
| | | AGCCTGCTGAGGAACGACGGAAAGACTCCTCTGTATTGGTACCTCCAGAAGGC |
| | | TGGACAGCCCCCGCAACTGCTCATCTACGAAGTGTCAAATCGCTTCTCCGGGG |
| | | TGCCGGATCGGTTTTCCGGCTCGGGATCGGGCACCGACTTCACCCTGAAAATC |
| | | TCCAGGGTCGAGGCCGAGGACGTGGGAGCCTACTACTGCATGCAAAACATCCA |
| | | GTTCCCTTCCTTCGGCGGCGGCACAAAGCTGGAGATTAAG |
| 139111- aa | 987 | EVQLLESGGGLVQPGGSLRLSCAVSGFALSNHGMSWVRRAPGKGLEWVSGIVY |
| VH | | SGSTYYAASVKGRFTISRDNSRNTLYLQMNSLRPEDTAIYYCSAHGGESDVWG |
| | | QGTTVTVSS |
| 139111- aa | 988 | DIVMTQTPLSLSVTPGQPASISCKSSQSLLRNDGKTPLYWYLQKAGQPPQLLI |
| VL | | YEVSNRFSGVPDRFSGSGSGTDFTLKISRVEAEDVGAYYCMQNIQFPSFGGGT |
| | | KLEIK |
| 139111- aa | 989 | MALPVTALLLPLALLLHAARPEVQLLESGGGLVQPGGSLRLSCAVSGFALSNH |
| Full CAR | | GMSWVRRAPGKGLEWVSGIVYSGSTYYAASVKGRFTISRDNSRNTLYLQMNSL |
| | | RPEDTAIYYCSAHGGESDVWGQGTTVTVSSASGGGGSGGRASGGGGSDIVMTQ |
| | | TPLSLSVTPGQPASISCKSSQSLLRNDGKTPLYWYLQKAGQPPQLLIYEVSNR |
| | | FSGVPDRFSGSGSGTDFTLKISRVEAEDVGAYYCMQNIQFPSFGGGTKLEIKT |
| | | TTPAPRPPTPAPTIASQPLSLRPEACRPAAGGAVHTRGLDFACDIYIWAPLAG |
| | | TCGVLLLSLVITLYCKRGRKKLLYIFKQPFMRPVQTTQEEDGCSCRFPEEEEG |
| | | GCELRVKFSRSADAPAYKQGQNQLYNELNLGRREEYDVLDKRRGRDPEMGGKP |
| | | RRKNPQEGLYNELQKDKMAEAYSEIGMKGERRRGKGHDGLYQGLSTATKDTYD |
| | | ALHMQALPPR |
| 139111- nt | 990 | ATGGCCCTCCCTGTCACCGCCCTGCTGCTTCCGCTGGCTCTTCTGCTCCACGC |
| Full CAR | | CGCTCGGCCCGAAGTGCAATTGTTGGAATCTGGAGGAGGACTTGTGCAGCCTG |
| | | GAGGATCACTGAGACTTTCGTGTGCGGTGTCAGGCTTCGCCCTGAGCAACCAC |
| | | GGCATGAGCTGGGTGCGGAGAGCCCCGGGGAAGGGTCTGGAATGGGTGTCCGG |
| | | GATCGTCTACTCCGGTTCAACTTACTACGCCGCAAGCGTGAAGGGTCGCTTCA |
| | | CCATTTCCCGCGATAACTCCCGGAACACCCTGTACCTCCAAATGAACTCCCTG |
| | | CGGCCCGAGGACACCGCCATCTACTACTGTTCCGCGCATGGAGGAGAGTCCGA |
| | | TGTCTGGGGACAGGGCACTACCGTGACCGTGTCGAGCGCCTCGGGGGGAGGAG |
| | | GCTCCGGCGGTCGCGCCTCCGGGGGGGGTGGCAGCGACATTGTGATGACGCAG |
| | | ACTCCACTCTCGCTGTCCGTGACCCCGGGACAGCCCGCGTCCATCTCGTGCAA |
| | | GAGCTCCCAGAGCCTGCTGAGGAACGACGGAAAGACTCCTCTGTATTGGTACC |
| | | TCCAGAAGGCTGGACAGCCCCCGCAACTGCTCATCTACGAAGTGTCAAATCGC |
| | | TTCTCCGGGGTGCCGGATCGGTTTTCCGGCTCGGGATCGGGCACCGACTTCAC |
| | | CCTGAAAATCTCCAGGGTCGAGGCCGAGGACGTGGGAGCCTACTACTGCATGC |
| | | AAAACATCCAGTTCCCTTCCTTCGGCGGCGGCACAAAGCTGGAGATTAAGACC |
| | | ACTACCCCAGCACCGAGGCCACCCACCCCGGCTCCTACCATCGCCTCCCAGCC |
| | | TCTGTCCCTGCGTCCGGAGGCATGTAGACCCGCAGCTGGTGGGGCCGTGCATA |
| | | CCCGGGGTCTTGACTTCGCCTGCGATATCTACATTTGGGCCCCTCTGGCTGGT |
| | | ACTTGCGGGGTCCTGCTGCTTTCACTCGTGATCACTCTTTACTGTAAGCGCGG |
| | | TCGGAAGAAGCTGCTGTACATCTTTAAGCAACCCTTCATGAGGCCTGTGCAGA |
| | | CTACTCAAGAGGAGGACGGCTGTTCATGCCGGTTCCCAGAGGAGGAGGAAGGC |
| | | GGCTGCGAACTGCGCGTGAAATTCAGCCGCAGCGCAGATGCTCCAGCCTACAA |
| | | GCAGGGGCAGAACCAGCTCTACAACGAACTCAATCTTGGTCGGAGAGAGGAGT |
| | | ACGACGTGCTGGACAAGCGGAGAGGACGGGACCCAGAAATGGGCGGGAAGCCG |
| | | CGCAGAAAGAATCCCCAAGAGGGCCTGTACAACGAGCTCCAAAAGGATAAGAT |
| | | GGCAGAAGCCTATAGCGAGATTGGTATGAAAGGGGAACGCAGAAGAGGCAAAG |
| | | GCCACGACGGACTGTACCAGGGACTCAGCACCGCCACCAAGGACACCTATGAC |
| | | GCTCTTCACATGCAGGCCCTGCCGCCTCGG |

139100

| | | |
|---|---|---|
| 139100- aa | 991 | QVQLVQSGAEVRKTGASVKVSCKASGYIFDNFGINWVRQAPGQGLEWMGWINP |
| ScFv domain | | KNNNTNYAQKFQGRVTITADESTNTAYMEVSSLRSEDTAVYYCARGPYYYQSY |
| | | MDVWGQGTMVTVSSASGGGGSGGRASGGGGSDIVMTQTPLSLPVTPGEPASIS |
| | | CRSSQSLLHSNGYNYLNWYLQKPGQSPQLLIYLGSKRASGVPDRFSGSGSGTD |
| | | FTLHITRVGAEDVGVYYCMQALQTPYTFGQGTKLEIK |
| 139100- nt | 992 | CAAGTCCAACTCGTCCAGTCCGGCGCAGAAGTCAGAAAAACCGGTGCTAGCGT |
| ScFv domain | | GAAAGTGTCCTGCAAGGCCTCCGGCTACATTTTCGATAACTTCGGAATCAACT |
| | | GGGTCAGACAGGCCCCGGGCCAGGGGCTGGAATGGATGGGATGGATCAACCCC |
| | | AAGAACAACAACACCAACTACGCACAGAAGTTCCAGGGCCGCGTGACTATCAC |
| | | CGCCGATGAATCGACCAATACCGCCTACATGGAGGTGTCCTCCCTGCGGTCGG |
| | | AGGACACTGCCGTGTATTACTGCGCGAGGGGCCCATACTACTACCAAAGCTAC |
| | | ATGGACGTCTGGGGACAGGGAACCATGGTGACCGTGTCATCCGCCTCCGGTGG |
| | | TGGAGGCTCCGGGGGGCGGGCTTCAGGAGGCGGAGGAAGCGATATTGTGATGA |
| | | CCCAGACTCCGCTTAGCCTGCCCGTGACTCCTGGAGAACCGGCCTCCATTTCC |
| | | TGCCGGTCCTCGCAATCACTCCTGCATTCCAACGGTTACAACTACCTGAATTG |
| | | GTACCTCCAGAAGCCTGGCCAGTCGCCCCAGTTGCTGATCTATCTGGGCTCGA |
| | | AGCGCGCCTCCGGGGTGCCTGACCGGTTTAGCGGATCTGGGAGCGGCACGGAC |
| | | TTCACTCTCCACATCACCCGCGTGGGAGCGGAGGACGTGGGAGTGTACTACTG |
| | | TATGCAGGCGCTGCAGACTCCGTACACATTCGGACAGGGCACCAAGCTGGAGA |
| | | TCAAG |
| 139100- aa | 993 | QVQLVQSGAEVRKTGASVKVSCKASGYIFDNFGINWVRQAPGQGLEWMGWINP |
| VH | | KNNNTNYAQKFQGRVTITADESTNTAYMEVSSLRSEDTAVYYCARGPYYYQSY |
| | | MDVWGQGTMVTVSS |
| 139100- aa | 994 | DIVMTQTPLSLPVTPGEPASISCRSSQSLLHSNGYNYLNWYLQKPGQSPQLLI |
| VL | | YLGSKRASGVPDRFSGSGSGTDFTLHITRVGAEDVGVYYCMQALQTPYTFGQG |
| | | TKLEIK |
| 139100- aa | 995 | MALPVTALLLPLALLLHAARPQVQLVQSGAEVRKTGASVKVSCKASGYIFDNF |
| Full CAR | | GINWVRQAPGQGLEWMGWINPKNNNTNYAQKFQGRVTITADESTNTAYMEVSS |
| | | LRSEDTAVYYCARGPYYYQSYMDVWGQGTMVTVSSASGGGGSGGRASGGGGSD |
| | | IVMTQTPLSLPVTPGEPASISCRSSQSLLHSNGYNYLNWYLQKPGQSPQLLIY |
| | | LGSKRASGVPDRFSGSGSGTDFTLHITRVGAEDVGVYYCMQALQTPYTFGQGT |
| | | KLEIKTTTPAPRPPTPAPTIASQPLSLRPEACRPAAGGAVHTRGLDFACDIYI |
| | | WAPLAGTCGVLLLSLVITLYCKRGRKKLLYIFKQPFMRPVQTTQEEDGCSCRF |
| | | PEEEEGGCELRVKFSRSADAPAYKQGQNQLYNELNLGRREEYDVLDKRRGRDP |
| | | EMGGKPRRKNPQEGLYNELQKDKMAEAYSEIGMKGERRRGKGHDGLYQGLSTA |
| | | TKDTYDALHMQALPPR |
| 139100- nt | 996 | ATGGCCCTCCCTGTCACCGCCCTGCTGCTTCCGCTGGCTCTTCTGCTCCACGC |
| Full CAR | | CGCTCGGCCCCAAGTCCAACTCGTCCAGTCCGGCGCAGAAGTCAGAAAAACCG |
| | | GTGCTAGCGTGAAAGTGTCCTGCAAGGCCTCCGGCTACATTTTCGATAACTTC |
| | | GGAATCAACTGGGTCAGACAGGCCCCGGGCCAGGGGCTGGAATGGATGGGATG |
| | | GATCAACCCCAAGAACAACAACACCAACTACGCACAGAAGTTCCAGGGCCGCG |
| | | TGACTATCACCGCCGATGAATCGACCAATACCGCCTACATGGAGGTGTCCTCC |
| | | CTGCGGTCGGAGGACACTGCCGTGTATTACTGCGCGAGGGGCCCATACTACTA |
| | | CCAAAGCTACATGGACGTCTGGGGACAGGGAACCATGGTGACCGTGTCATCCG |
| | | CCTCCGGTGGTGGAGGCTCCGGGGGGCGGGCTTCAGGAGGCGGAGGAAGCGAT |
| | | ATTGTGATGACCCAGACTCCGCTTAGCCTGCCCGTGACTCCTGGAGAACCGGC |
| | | CTCCATTTCCTGCCGGTCCTCGCAATCACTCCTGCATTCCAACGGTTACAACT |
| | | ACCTGAATTGGTACCTCCAGAAGCCTGGCCAGTCGCCCCAGTTGCTGATCTAT |
| | | CTGGGCTCGAAGCGCGCCTCCGGGGTGCCTGACCGGTTTAGCGGATCTGGGAG |
| | | CGGCACGGACTTCACTCTCCACATCACCCGCGTGGGAGCGGAGGACGTGGGAG |
| | | TGTACTACTGTATGCAGGCGCTGCAGACTCCGTACACATTCGGACAGGGCACC |
| | | AAGCTGGAGATCAAGACCACTACCCCAGCACCGAGGCCACCCACCCCGGCTCC |
| | | TACCATCGCCTCCCAGCCTCTGTCCCTGCGTCCGGAGGCATGTAGACCCGCAG |
| | | CTGGTGGGGCCGTGCATACCCGGGGTCTTGACTTCGCCTGCGATATCTACATT |
| | | TGGGCCCCTCTGGCTGGTACTTGCGGGGTCCTGCTGCTTTCACTCGTGATCAC |
| | | TCTTTACTGTAAGCGCGGTCGGAAGAAGCTGCTGTACATCTTTAAGCAACCCT |
| | | TCATGAGGCCTGTGCAGACTACTCAAGAGGAGGACGGCTGTTCATGCCGGTTC |
| | | CCAGAGGAGGAGGAAGGCGGCTGCGAACTGCGCGTGAAATTCAGCCGCAGCGC |
| | | AGATGCTCCAGCCTACAAGCAGGGGCAGAACCAGCTCTACAACGAACTCAATC |
| | | TTGGTCGGAGAGAGGAGTACGACGTGCTGGACAAGCGGAGAGGACGGGACCCA |
| | | GAAATGGGCGGGAAGCCGCGCAGAAAGAATCCCCAAGAGGGCCTGTACAACGA |
| | | GCTCCAAAAGGATAAGATGGCAGAAGCCTATAGCGAGATTGGTATGAAAGGGG |
| | | AACGCAGAAGAGGCAAAGGCCACGACGGACTGTACCAGGGACTCAGCACCGCC |
| | | ACCAAGGACACCTATGACGCTCTTCACATGCAGGCCCTGCCGCCTCGG |

139101

| | | |
|---|---|---|
| 139101- aa | 997 | QVQLQESGGGLVQPGGSLRLSCAASGFTFSSDAMTWVRQAPGKGLEWVSVISG |
| ScFv domain | | SGGTTYYADSVKGRFTISRDNSKNTLYLQMNSLRAEDTAVYYCAKLDSSGYYY |
| | | ARGPRYWGQGTLVTVSSASGGGGSGGRASGGGGSDIQLTQSPSSLSASVGDRV |
| | | TITCRASQSISSYLNWYQQKPGKAPKLLIYGASTLASGVPARFSGSGSGTHFT |
| | | LTINSLQSEDSATYYCQQSYKRASFGQGTKVEIK |
| 139101- nt | 998 | CAAGTGCAACTTCAAGAATCAGGCGGAGGACTCGTGCAGCCCGGAGGATCATT |
| ScFv domain | | GCGGCTCTCGTGCGCCGCCTCGGGCTTCACCTTCTCGAGCGACGCCATGACCT |
| | | GGGTCCGCCAGGCCCCGGGGAAGGGGCTGGAATGGGTGTCTGTGATTTCCGGC |
| | | TCCGGGGGAACTACGTACTACGCCGATTCCGTGAAAGGTCGCTTCACTATCTC |
| | | CCGGGACAACAGCAAGAACACCCTTTATCTGCAAATGAATTCCCTCCGCGCCG |
| | | AGGACACCGCCGTGTACTACTGCGCCAAGCTGGACTCCTCGGGCTACTACTAT |
| | | GCCCGGGGTCCGAGATACTGGGGACAGGGAACCCTCGTGACCGTGTCCTCCGC |
| | | GTCCGGCGGAGGAGGGTCGGGAGGGCGGGCCTCCGGCGGCGGCGGTTCGGACA |
| | | TCCAGCTGACCCAGTCCCCATCCTCACTGAGCGCAAGCGTGGGCGACAGAGTC |
| | | ACCATTACATGCAGGGCGTCCCAGAGCATCAGCTCCTACCTGAACTGGTACCA |
| | | ACAGAAGCCTGGAAAGGCTCCTAAGCTGTTGATCTACGGGGCTTCGACCCTGG |
| | | CATCCGGGGTGCCCGCGAGGTTTAGCGGAAGCGGTAGCGGCACTCACTTCACT |
| | | CTGACCATTAACAGCCTCCAGTCCGAGGATTCAGCCACTTACTACTGTCAGCA |
| | | GTCCTACAAGCGGGCCAGCTTCGGACAGGGCACTAAGGTCGAGATCAAG |
| 139101- aa | 999 | QVQLQESGGGLVQPGGSLRLSCAASGFTFSSDAMTWVRQAPGKGLEWVSVISG |
| VH | | SGGTTYYADSVKGRFTISRDNSKNTLYLQMNSLRAEDTAVYYCAKLDSSGYYY |
| | | ARGPRYWGQGTLVTVSS |
| 139101- aa | 1000 | DIQLTQSPSSLSASVGDRVTITCRASQSISSYLNWYQQKPGKAPKLLIYGAST |
| VL | | LASGVPARFSGSGSGTHFTLTINSLQSEDSATYYCQQSYKRASFGQGTKVEIK |
| 139101- aa | 1001 | MALPVTALLLPLALLLHAARPQVQLQESGGGLVQPGGSLRLSCAASGFTFSSD |
| Full CAR | | AMTWVRQAPGKGLEWVSVISGSGGTTYYADSVKGRFTISRDNSKNTLYLQMNS |
| | | LRAEDTAVYYCAKLDSSGYYYARGPRYWGQGTLVTVSSASGGGGSGGRASGGG |
| | | GSDIQLTQSPSSLSASVGDRVTITCRASQSISSYLNWYQQKPGKAPKLLIYGA |
| | | STLASGVPARFSGSGSGTHFTLTINSLQSEDSATYYCQQSYKRASFGQGTKVE |
| | | IKTTTPAPRPPTPAPTIASQPLSLRPEACRPAAGGAVHTRGLDFACDIYIWAP |
| | | LAGTCGVLLLSLVITLYCKRGRKKLLYIFKQPFMRPVQTTQEEDGCSCRFPEE |
| | | EEGGCELRVKFSRSADAPAYKQGQNQLYNELNLGRREEYDVLDKRRGRDPEMG |
| | | GKPRRKNPQEGLYNELQKDKMAEAYSEIGMKGERRRGKGHDGLYQGLSTATKD |
| | | TYDALHMQALPPR |
| 139101- nt | 1002 | ATGGCCCTCCCTGTCACCGCCCTGCTGCTTCCGCTGGCTCTTCTGCTCCACGC |
| Full CAR | | CGCTCGGCCCCAAGTGCAACTTCAAGAATCAGGCGGAGGACTCGTGCAGCCCG |
| | | GAGGATCATTGCGGCTCTCGTGCGCCGCCTCGGGCTTCACCTTCTCGAGCGAC |
| | | GCCATGACCTGGGTCCGCCAGGCCCCGGGGAAGGGGCTGGAATGGGTGTCTGT |
| | | GATTTCCGGCTCCGGGGGAACTACGTACTACGCCGATTCCGTGAAAGGTCGCT |
| | | TCACTATCTCCCGGGACAACAGCAAGAACACCCTTTATCTGCAAATGAATTCC |
| | | CTCCGCGCCGAGGACACCGCCGTGTACTACTGCGCCAAGCTGGACTCCTCGGG |
| | | CTACTACTATGCCCGGGGTCCGAGATACTGGGGACAGGGAACCCTCGTGACCG |
| | | TGTCCTCCGCGTCCGGCGGAGGAGGGTCGGGAGGGCGGGCCTCCGGCGGCGGC |
| | | GGTTCGGACATCCAGCTGACCCAGTCCCCATCCTCACTGAGCGCAAGCGTGGG |
| | | CGACAGAGTCACCATTACATGCAGGGCGTCCCAGAGCATCAGCTCCTACCTGA |
| | | ACTGGTACCAACAGAAGCCTGGAAAGGCTCCTAAGCTGTTGATCTACGGGGCT |
| | | TCGACCCTGGCATCCGGGGTGCCCGCGAGGTTTAGCGGAAGCGGTAGCGGCAC |
| | | TCACTTCACTCTGACCATTAACAGCCTCCAGTCCGAGGATTCAGCCACTTACT |
| | | ACTGTCAGCAGTCCTACAAGCGGGCCAGCTTCGGACAGGGCACTAAGGTCGAG |
| | | ATCAAGACCACTACCCCAGCACCGAGGCCACCCACCCCGGCTCCTACCATCGC |
| | | CTCCCAGCCTCTGTCCCTGCGTCCGGAGGCATGTAGACCCGCAGCTGGTGGGG |
| | | CCGTGCATACCCGGGGTCTTGACTTCGCCTGCGATATCTACATTTGGGCCCCT |
| | | CTGGCTGGTACTTGCGGGGTCCTGCTGCTTTCACTCGTGATCACTCTTTACTG |
| | | TAAGCGCGGTCGGAAGAAGCTGCTGTACATCTTTAAGCAACCCTTCATGAGGC |
| | | CTGTGCAGACTACTCAAGAGGAGGACGGCTGTTCATGCCGGTTCCCAGAGGAG |
| | | GAGGAAGGCGGCTGCGAACTGCGCGTGAAATTCAGCCGCAGCGCAGATGCTCC |
| | | AGCCTACAAGCAGGGGCAGAACCAGCTCTACAACGAACTCAATCTTGGTCGGA |
| | | GAGAGGAGTACGACGTGCTGGACAAGCGGAGAGGACGGGACCCAGAAATGGGC |
| | | GGGAAGCCGCGCAGAAAGAATCCCCAAGAGGGCCTGTACAACGAGCTCCAAAA |
| | | GGATAAGATGGCAGAAGCCTATAGCGAGATTGGTATGAAAGGGGAACGCAGAA |
| | | GAGGCAAAGGCCACGACGGACTGTACCAGGGACTCAGCACCGCCACCAAGGAC |
| | | ACCTATGACGCTCTTCACATGCAGGCCCTGCCGCCTCGG |

139102

| | | |
|---|---|---|
| 139102- aa | 1003 | QVQLVQSGAEVKKPGASVKVSCKASGYTFSNYGITWVRQAPGQGLEWMGWISA |
| ScFv domain | | YNGNTNYAQKFQGRVTMTRNTSISTAYMELSSLRSEDTAVYYCARGPYYYYMD |
| | | VWGKGTMVTVSSASGGGGSGGRASGGGGSEIVMTQSPLSLPVTPGEPASISCR |
| | | SSQSLLYSNGYNYVDWYLQKPGQSPQLLIYLGSNRASGVPDRFSGSGSGTDFK |
| | | LQISRVEAEDVGIYYCMQGRQFPYSFGQGTKVEIK |
| 139102- nt | 1004 | CAAGTCCAACTGGTCCAGAGCGGTGCAGAAGTGAAGAAGCCCGGAGCGAGCGT |
| ScFv domain | | GAAAGTGTCCTGCAAGGCTTCCGGGTACACCTTCTCCAACTACGGCATCACTT |
| | | GGGTGCGCCAGGCCCCGGGACAGGGCCTGGAATGGATGGGGTGGATTTCCGCG |
| | | TACAACGGCAATACGAACTACGCTCAGAAGTTCCAGGGTAGAGTGACCATGAC |
| | | TAGGAACACCTCCATTTCCACCGCCTACATGGAACTGTCCTCCCTGCGGAGCG |
| | | AGGACACCGCCGTGTACTATTGCGCCCGGGGACCATACTACTACTACATGGAT |
| | | GTCTGGGGGAAGGGGACTATGGTCACCGTGTCATCCGCCTCGGGAGGCGGCGG |
| | | ATCAGGAGGACGCGCCTCTGGTGGTGGAGGATCGGAGATCGTGATGACCCAGA |
| | | GCCCTCTCTCCTTGCCCGTGACTCCTGGGGAGCCCGCATCCATTTCATGCCGG |
| | | AGCTCCCAGTCACTTCTCTACTCCAACGGCTATAACTACGTGGATTGGTACCT |
| | | CCAAAAGCCGGGCCAGAGCCCGCAGCTGCTGATCTACCTGGGCTCGAACAGGG |
| | | CCAGCGGAGTGCCTGACCGGTTCTCCGGGTCGGGAAGCGGGACCGACTTCAAG |
| | | CTGCAAATCTCGAGAGTGGAGGCCGAGGACGTGGGAATCTACTACTGTATGCA |
| | | GGGCCGCCAGTTTCCGTACTCGTTCGGACAGGGCACCAAAGTGGAAATCAAG |
| 139102- aa | 1005 | QVQLVQSGAEVKKPGASVKVSCKASGYTFSNYGITWVRQAPGQGLEWMGWISA |
| VH | | YNGNTNYAQKFQGRVTMTRNTSISTAYMELSSLRSEDTAVYYCARGPYYYYMD |
| | | VWGKGTMVTVSS |
| 139102- aa | 1006 | EIVMTQSPLSLPVTPGEPASISCRSSQSLLYSNGYNYVDWYLQKPGQSPQLLI |
| VL | | YLGSNRASGVPDRFSGSGSGTDFKLQISRVEAEDVGIYYCMQGRQFPYSFGQG |
| | | TKVEIK |
| 139102- aa | 1007 | MALPVTALLLPLALLLHAARPQVQLVQSGAEVKKPGASVKVSCKASGYTFSNY |
| Full CAR | | GITWVRQAPGQGLEWMGWISAYNGNTNYAQKFQGRVTMTRNTSISTAYMELSS |
| | | LRSEDTAVYYCARGPYYYYMDVWGKGTMVTVSSASGGGGSGGRASGGGGSEIV |
| | | MTQSPLSLPVTPGEPASISCRSSQSLLYSNGYNYVDWYLQKPGQSPQLLIYLG |
| | | SNRASGVPDRFSGSGSGTDFKLQISRVEAEDVGIYYCMQGRQFPYSFGQGTKV |
| | | EIKTTTPAPRPPTPAPTIASQPLSLRPEACRPAAGGAVHTRGLDFACDIYIWA |
| | | PLAGTCGVLLLSLVITLYCKRGRKKLLYIFKQPFMRPVQTTQEEDGCSCRFPE |
| | | EEEGGCELRVKFSRSADAPAYKQGQNQLYNELNLGRREEYDVLDKRRGRDPEM |
| | | GGKPRRKNPQEGLYNELQKDKMAEAYSEIGMKGERRRGKGHDGLYQGLSTATK |
| | | DTYDALHMQALPPR |
| 139102- nt | 1008 | ATGGCCCTCCCTGTCACCGCCCTGCTGCTTCCGCTGGCTCTTCTGCTCCACGC |
| Full CAR | | CGCTCGGCCCCAAGTCCAACTGGTCCAGAGCGGTGCAGAAGTGAAGAAGCCCG |
| | | GAGCGAGCGTGAAAGTGTCCTGCAAGGCTTCCGGGTACACCTTCTCCAACTAC |
| | | GGCATCACTTGGGTGCGCCAGGCCCCGGGACAGGGCCTGGAATGGATGGGGTG |
| | | GATTTCCGCGTACAACGGCAATACGAACTACGCTCAGAAGTTCCAGGGTAGAG |
| | | TGACCATGACTAGGAACACCTCCATTTCCACCGCCTACATGGAACTGTCCTCC |
| | | CTGCGGAGCGAGGACACCGCCGTGTACTATTGCGCCCGGGGACCATACTACTA |
| | | CTACATGGATGTCTGGGGGAAGGGGACTATGGTCACCGTGTCATCCGCCTCGG |
| | | GAGGCGGCGGATCAGGAGGACGCGCCTCTGGTGGTGGAGGATCGGAGATCGTG |
| | | ATGACCCAGAGCCCTCTCTCCTTGCCCGTGACTCCTGGGGAGCCCGCATCCAT |
| | | TTCATGCCGGAGCTCCCAGTCACTTCTCTACTCCAACGGCTATAACTACGTGG |
| | | ATTGGTACCTCCAAAAGCCGGGCCAGAGCCCGCAGCTGCTGATCTACCTGGGC |
| | | TCGAACAGGGCCAGCGGAGTGCCTGACCGGTTCTCCGGGTCGGGAAGCGGGAC |
| | | CGACTTCAAGCTGCAAATCTCGAGAGTGGAGGCCGAGGACGTGGGAATCTACT |
| | | ACTGTATGCAGGGCCGCCAGTTTCCGTACTCGTTCGGACAGGGCACCAAAGTG |
| | | GAAATCAAGACCACTACCCCAGCACCGAGGCCACCCACCCCGGCTCCTACCAT |
| | | CGCCTCCCAGCCTCTGTCCCTGCGTCCGGAGGCATGTAGACCCGCAGCTGGTG |
| | | GGGCCGTGCATACCCGGGGTCTTGACTTCGCCTGCGATATCTACATTTGGGCC |
| | | CCTCTGGCTGGTACTTGCGGGGTCCTGCTGCTTTCACTCGTGATCACTCTTTA |
| | | CTGTAAGCGCGGTCGGAAGAAGCTGCTGTACATCTTTAAGCAACCCTTCATGA |
| | | GGCCTGTGCAGACTACTCAAGAGGAGGACGGCTGTTCATGCCGGTTCCCAGAG |
| | | GAGGAGGAAGGCGGCTGCGAACTGCGCGTGAAATTCAGCCGCAGCGCAGATGC |
| | | TCCAGCCTACAAGCAGGGGCAGAACCAGCTCTACAACGAACTCAATCTTGGTC |
| | | GGAGAGAGGAGTACGACGTGCTGGACAAGCGGAGAGGACGGGACCCAGAAATG |
| | | GGCGGGAAGCCGCGCAGAAAGAATCCCCAAGAGGGCCTGTACAACGAGCTCCA |
| | | AAAGGATAAGATGGCAGAAGCCTATAGCGAGATTGGTATGAAAGGGGAACGCA |
| | | GAAGAGGCAAAGGCCACGACGGACTGTACCAGGGACTCAGCACCGCCACCAAG |
| | | GACACCTATGACGCTCTTCACATGCAGGCCCTGCCGCCTCGG |

139104

| | | |
|---|---|---|
| 139104- aa | 1009 | EVQLLETGGGLVQPGGSLRLSCAVSGFALSNHGMSWVRRAPGKGLEWVSGIVY |
| ScFv domain | | SGSTYYAASVKGRFTISRDNSRNTLYLQMNSLRPEDTAIYYCSAHGGESDVWG |
| | | QGTTVTVSSASGGGGSGGRASGGGGSEIVLTQSPATLSVSPGESATLSCRASQ |
| | | SVSSNLAWYQQKPGQAPRLLIYGASTRASGIPDRFSGSGSGTDFTLTISSLQA |
| | | EDVAVYYCQQYGSSLTFGGGTKVEIK |
| 139104- nt | 1010 | GAAGTGCAATTGCTCGAAACTGGAGGAGGTCTGGTGCAACCTGGAGGATCACT |
| ScFv domain | | TCGCCTGTCCTGCGCCGTGTCGGGCTTTGCCCTGTCCAACCATGGAATGAGCT |
| | | GGGTCCGCCGCGCGCCGGGGAAGGGCCTCGAATGGGTGTCCGGCATCGTCTAC |
| | | TCCGGCTCCACCTACTACGCCGCGTCCGTGAAGGGCCGGTTCACGATTTCACG |
| | | GGACAACTCGCGGAACACCCTGTACCTCCAAATGAATTCCCTTCGGCCGGAGG |
| | | ATACTGCCATCTACTACTGCTCCGCCCACGGTGGCGAATCCGACGTCTGGGGC |
| | | CAGGGAACCACCGTGACCGTGTCCAGCGCGTCCGGGGGAGGAGGAAGCGGGGG |
| | | TAGAGCATCGGGTGGAGGCGGATCAGAGATCGTGCTGACCCAGTCCCCCGCCA |
| | | CCTTGAGCGTGTCACCAGGAGAGTCCGCCACCCTGTCATGCCGCGCCAGCCAG |
| | | TCCGTGTCCTCCAACCTGGCTTGGTACCAGCAGAAGCCGGGGCAGGCCCCTAG |
| | | ACTCCTGATCTATGGGGCGTCGACCCGGGCATCTGGAATTCCCGATAGGTTCA |
| | | GCGGATCGGGCTCGGGCACTGACTTCACTCTGACCATCTCCTCGCTGCAAGCC |
| | | GAGGACGTGGCTGTGTACTACTGTCAGCAGTACGGAAGCTCCCTGACTTTCGG |
| | | TGGCGGGACCAAAGTCGAGATTAAG |
| 139104- aa | 1011 | EVQLLETGGGLVQPGGSLRLSCAVSGFALSNHGMSWVRRAPGKGLEWVSGIVY |
| VH | | SGSTYYAASVKGRFTISRDNSRNTLYLQMNSLRPEDTAIYYCSAHGGESDVWG |
| | | QGTTVTVSS |
| 139104- aa | 1012 | EIVLTQSPATLSVSPGESATLSCRASQSVSSNLAWYQQKPGQAPRLLIYGAST |
| VL | | RASGIPDRFSGSGSGTDFTLTISSLQAEDVAVYYCQQYGSSLTFGGGTKVEIK |
| 139104- aa | 1013 | MALPVTALLLPLALLLHAARPEVQLLETGGGLVQPGGSLRLSCAVSGFALSNH |
| Full CAR | | GMSWVRRAPGKGLEWVSGIVYSGSTYYAASVKGRFTISRDNSRNTLYLQMNSL |
| | | RPEDTAIYYCSAHGGESDVWGQGTTVTVSSASGGGGSGGRASGGGGSEIVLTQ |
| | | SPATLSVSPGESATLSCRASQSVSSNLAWYQQKPGQAPRLLIYGASTRASGIP |
| | | DRFSGSGSGTDFTLTISSLQAEDVAVYYCQQYGSSLTFGGGTKVEIKTTTPAP |
| | | RPPTPAPTIASQPLSLRPEACRPAAGGAVHTRGLDFACDIYIWAPLAGTCGVL |
| | | LLSLVITLYCKRGRKKLLYIFKQPFMRPVQTTQEEDGCSCRFPEEEEGGCELR |
| | | VKFSRSADAPAYKQGQNQLYNELNLGRREEYDVLDKRRGRDPEMGGKPRRKNP |
| | | QEGLYNELQKDKMAEAYSEIGMKGERRRGKGHDGLYQGLSTATKDTYDALHMQ |
| | | ALPPR |
| 139104- nt | 1014 | ATGGCCCTCCCTGTCACCGCCCTGCTGCTTCCGCTGGCTCTTCTGCTCCACGC |
| Full CAR | | CGCTCGGCCCGAAGTGCAATTGCTCGAAACTGGAGGAGGTCTGGTGCAACCTG |
| | | GAGGATCACTTCGCCTGTCCTGCGCCGTGTCGGGCTTTGCCCTGTCCAACCAT |
| | | GGAATGAGCTGGGTCCGCCGCGCGCCGGGGAAGGGCCTCGAATGGGTGTCCGG |
| | | CATCGTCTACTCCGGCTCCACCTACTACGCCGCGTCCGTGAAGGGCCGGTTCA |
| | | CGATTTCACGGGACAACTCGCGGAACACCCTGTACCTCCAAATGAATTCCCTT |
| | | CGGCCGGAGGATACTGCCATCTACTACTGCTCCGCCCACGGTGGCGAATCCGA |
| | | CGTCTGGGGCCAGGGAACCACCGTGACCGTGTCCAGCGCGTCCGGGGGAGGAG |
| | | GAAGCGGGGGTAGAGCATCGGGTGGAGGCGGATCAGAGATCGTGCTGACCCAG |
| | | TCCCCCGCCACCTTGAGCGTGTCACCAGGAGAGTCCGCCACCCTGTCATGCCG |
| | | CGCCAGCCAGTCCGTGTCCTCCAACCTGGCTTGGTACCAGCAGAAGCCGGGGC |
| | | AGGCCCCTAGACTCCTGATCTATGGGGCGTCGACCCGGGCATCTGGAATTCCC |
| | | GATAGGTTCAGCGGATCGGGCTCGGGCACTGACTTCACTCTGACCATCTCCTC |
| | | GCTGCAAGCCGAGGACGTGGCTGTGTACTACTGTCAGCAGTACGGAAGCTCCC |
| | | TGACTTTCGGTGGCGGGACCAAAGTCGAGATTAAGACCACTACCCCAGCACCG |
| | | AGGCCACCCACCCCGGCTCCTACCATCGCCTCCCAGCCTCTGTCCCTGCGTCC |
| | | GGAGGCATGTAGACCCGCAGCTGGTGGGGCCGTGCATACCCGGGGTCTTGACT |
| | | TCGCCTGCGATATCTACATTTGGGCCCCTCTGGCTGGTACTTGCGGGGTCCTG |
| | | CTGCTTTCACTCGTGATCACTCTTTACTGTAAGCGCGGTCGGAAGAAGCTGCT |
| | | GTACATCTTTAAGCAACCCTTCATGAGGCCTGTGCAGACTACTCAAGAGGAGG |
| | | ACGGCTGTTCATGCCGGTTCCCAGAGGAGGAGGAAGGCGGCTGCGAACTGCGC |
| | | GTGAAATTCAGCCGCAGCGCAGATGCTCCAGCCTACAAGCAGGGGCAGAACCA |
| | | GCTCTACAACGAACTCAATCTTGGTCGGAGAGAGGAGTACGACGTGCTGGACA |
| | | AGCGGAGAGGACGGGACCCAGAAATGGGCGGGAAGCCGCGCAGAAAGAATCCC |
| | | CAAGAGGGCCTGTACAACGAGCTCCAAAAGGATAAGATGGCAGAAGCCTATAG |
| | | CGAGATTGGTATGAAAGGGGAACGCAGAAGAGGCAAAGGCCACGACGGACTGT |
| | | ACCAGGGACTCAGCACCGCCACCAAGGACACCTATGACGCTCTTCACATGCAG |
| | | GCCCTGCCGCCTCGG |

139106

| | | |
|---|---|---|
| 139106- aa | 1015 | EVQLVETGGGLVQPGGSLRLSCAVSGFALSNHGMSWVRRAPGKGLEWVSGIVY |
| ScFv domain | | SGSTYYAASVKGRFTISRDNSRNTLYLQMNSLRPEDTAIYYCSAHGGESDVWG |
| | | QGTTVTVSSASGGGGSGGRASGGGGSEIVMTQSPATLSVSPGERATLSCRASQ |
| | | SVSSKLAWYQQKPGQAPRLLMYGASIRATGIPDRFSGSGSGTEFTLTISSLEP |
| | | EDFAVYYCQQYGSSSWTFGQGTKVEIK |
| 139106- nt | 1016 | GAAGTGCAATTGGTGGAAACTGGAGGAGGACTTGTGCAACCTGGAGGATCATT |
| ScFv domain | | GAGACTGAGCTGCGCAGTGTCGGGATTCGCCCTGAGCAACCATGGAATGTCCT |
| | | GGGTCAGAAGGGCCCCTGGAAAAGGCCTCGAATGGGTGTCAGGGATCGTGTAC |
| | | TCCGGTTCCACTTACTACGCCGCCTCCGTGAAGGGGCGCTTCACTATCTCACG |
| | | GGATAACTCCCGCAATACCCTGTACCTCCAAATGAACAGCCTGCGGCCGGAGG |
| | | ATACCGCCATCTACTACTGTTCCGCCCACGGTGGAGAGTCTGACGTCTGGGGC |
| | | CAGGGAACTACCGTGACCGTGTCCTCCGCGTCCGGCGGTGGAGGGAGCGGCGG |
| | | CCGCGCCAGCGGCGGCGGAGGCTCCGAGATCGTGATGACCCAGAGCCCCGCTA |
| | | CTCTGTCGGTGTCGCCCGGAGAAAGGGCGACCCTGTCCTGCCGGGCGTCGCAG |
| | | TCCGTGAGCAGCAAGCTGGCTTGGTACCAGCAGAAGCCGGGCCAGGCACCACG |
| | | CCTGCTTATGTACGGTGCCTCCATTCGGGCCACCGGAATCCCGGACCGGTTCT |
| | | CGGGGTCGGGGTCCGGTACCGAGTTCACACTGACCATTTCCTCGCTCGAGCCC |
| | | GAGGACTTTGCCGTCTATTACTGCCAGCAGTACGGCTCCTCCTCATGGACGTT |
| | | CGGCCAGGGGACCAAGGTCGAAATCAAG |
| 139106- aa | 1017 | EVQLVETGGGLVQPGGSLRLSCAVSGFALSNHGMSWVRRAPGKGLEWVSGIVY |
| VH | | SGSTYYAASVKGRFTISRDNSRNTLYLQMNSLRPEDTAIYYCSAHGGESDVWG |
| | | QGTTVTVSS |
| 139106- aa | 1018 | EIVMTQSPATLSVSPGERATLSCRASQSVSSKLAWYQQKPGQAPRLLMYGASI |
| VL | | RATGIPDRFSGSGSGTEFTLTISSLEPEDFAVYYCQQYGSSSWTFGQGTKVEI |
| | | K |
| 139106- aa | 1019 | MALPVTALLLPLALLLHAARPEVQLVETGGGLVQPGGSLRLSCAVSGFALSNH |
| Full CAR | | GMSWVRRAPGKGLEWVSGIVYSGSTYYAASVKGRFTISRDNSRNTLYLQMNSL |
| | | RPEDTAIYYCSAHGGESDVWGQGTTVTVSSASGGGGSGGRASGGGGSEIVMTQ |
| | | SPATLSVSPGERATLSCRASQSVSSKLAWYQQKPGQAPRLLMYGASIRATGIP |
| | | DRFSGSGSGTEFTLTISSLEPEDFAVYYCQQYGSSSWTFGQGTKVEIKTTTPA |
| | | PRPPTPAPTIASQPLSLRPEACRPAAGGAVHTRGLDFACDIYIWAPLAGTCGV |
| | | LLLSLVITLYCKRGRKKLLYIFKQPFMRPVQTTQEEDGCSCRFPEEEEGGCEL |
| | | RVKFSRSADAPAYKQGQNQLYNELNLGRREEYDVLDKRRGRDPEMGGKPRRKN |
| | | PQEGLYNELQKDKMAEAYSEIGMKGERRRGKGHDGLYQGLSTATKDTYDALHM |
| | | QALPPR |
| 139106- nt | 1020 | ATGGCCCTCCCTGTCACCGCCCTGCTGCTTCCGCTGGCTCTTCTGCTCCACGC |
| Full CAR | | CGCTCGGCCCGAAGTGCAATTGGTGGAAACTGGAGGAGGACTTGTGCAACCTG |
| | | GAGGATCATTGAGACTGAGCTGCGCAGTGTCGGGATTCGCCCTGAGCAACCAT |
| | | GGAATGTCCTGGGTCAGAAGGGCCCCTGGAAAAGGCCTCGAATGGGTGTCAGG |
| | | GATCGTGTACTCCGGTTCCACTTACTACGCCGCCTCCGTGAAGGGGCGCTTCA |
| | | CTATCTCACGGGATAACTCCCGCAATACCCTGTACCTCCAAATGAACAGCCTG |
| | | CGGCCGGAGGATACCGCCATCTACTACTGTTCCGCCCACGGTGGAGAGTCTGA |
| | | CGTCTGGGGCCAGGGAACTACCGTGACCGTGTCCTCCGCGTCCGGCGGTGGAG |
| | | GGAGCGGCGGCCGCGCCAGCGGCGGCGGAGGCTCCGAGATCGTGATGACCCAG |
| | | AGCCCCGCTACTCTGTCGGTGTCGCCCGGAGAAAGGGCGACCCTGTCCTGCCG |
| | | GGCGTCGCAGTCCGTGAGCAGCAAGCTGGCTTGGTACCAGCAGAAGCCGGGCC |
| | | AGGCACCACGCCTGCTTATGTACGGTGCCTCCATTCGGGCCACCGGAATCCCG |
| | | GACCGGTTCTCGGGGTCGGGGTCCGGTACCGAGTTCACACTGACCATTTCCTC |
| | | GCTCGAGCCCGAGGACTTTGCCGTCTATTACTGCCAGCAGTACGGCTCCTCCT |
| | | CATGGACGTTCGGCCAGGGGACCAAGGTCGAAATCAAGACCACTACCCCAGCA |
| | | CCGAGGCCACCCACCCCGGCTCCTACCATCGCCTCCCAGCCTCTGTCCCTGCG |
| | | TCCGGAGGCATGTAGACCCGCAGCTGGTGGGGCCGTGCATACCCGGGGTCTTG |
| | | ACTTCGCCTGCGATATCTACATTTGGGCCCCTCTGGCTGGTACTTGCGGGGTC |
| | | CTGCTGCTTTCACTCGTGATCACTCTTTACTGTAAGCGCGGTCGGAAGAAGCT |
| | | GCTGTACATCTTTAAGCAACCCTTCATGAGGCCTGTGCAGACTACTCAAGAGG |
| | | AGGACGGCTGTTCATGCCGGTTCCCAGAGGAGGAGGAAGGCGGCTGCGAACTG |
| | | CGCGTGAAATTCAGCCGCAGCGCAGATGCTCCAGCCTACAAGCAGGGGCAGAA |
| | | CCAGCTCTACAACGAACTCAATCTTGGTCGGAGAGAGGAGTACGACGTGCTGG |
| | | ACAAGCGGAGAGGACGGGACCCAGAAATGGGCGGGAAGCCGCGCAGAAAGAAT |
| | | CCCCAAGAGGGCCTGTACAACGAGCTCCAAAAGGATAAGATGGCAGAAGCCTA |
| | | TAGCGAGATTGGTATGAAAGGGGAACGCAGAAGAGGCAAAGGCCACGACGGAC |
| | | TGTACCAGGGACTCAGCACCGCCACCAAGGACACCTATGACGCTCTTCACATG |
| | | CAGGCCCTGCCGCCTCGG |

139107

| | | |
|---|---|---|
| 139107- aa | 1021 | EVQLVETGGGVVQPGGSLRLSCAVSGFALSNHGMSWVRRAPGKGLEWVSGIVY |
| ScFv domain | | SGSTYYAASVKGRFTISRDNSRNTLYLQMNSLRPEDTAIYYCSAHGGESDVWG |
| | | QGTTVTVSSASGGGGSGGRASGGGGSEIVLTQSPGTLSLSPGERATLSCRASQ |
| | | SVGSTNLAWYQQKPGQAPRLLIYDASNRATGIPDRFSGGGSGTDFTLTISRLE |
| | | PEDFAVYYCQQYGSSPPWTFGQGTKVEIK |
| 139107- nt | 1022 | GAAGTGCAATTGGTGGAGACTGGAGGAGGAGTGGTGCAACCTGGAGGAAGCCT |
| ScFv domain | | GAGACTGTCATGCGCGGTGTCGGGCTTCGCCCTCTCCAACCACGGAATGTCCT |
| | | GGGTCCGCCGGGCCCCTGGGAAAGGACTTGAATGGGTGTCCGGCATCGTGTAC |
| | | TCGGGTTCCACCTACTACGCGGCCTCAGTGAAGGGCCGGTTTACTATTAGCCG |
| | | CGACAACTCCAGAAACACACTGTACCTCCAAATGAACTCGCTGCGGCCGGAAG |
| | | ATACCGCTATCTACTACTGCTCCGCCCATGGGGGAGAGTCGGACGTCTGGGGA |
| | | CAGGGCACCACTGTCACTGTGTCCAGCGCTTCCGGCGGTGGTGGAAGCGGGGG |
| | | ACGGGCCTCAGGAGGCGGTGGCAGCGAGATTGTGCTGACCCAGTCCCCCGGGA |
| | | CCCTGAGCCTGTCCCCGGGAGAAAGGGCCACCCTCTCCTGTCGGGCATCCCAG |
| | | TCCGTGGGGTCTACTAACCTTGCATGGTACCAGCAGAAGCCCGGCCAGGCCCC |
| | | TCGCCTGCTGATCTACGACGCGTCCAATAGAGCCACCGGCATCCCGGATCGCT |
| | | TCAGCGGAGGCGGATCGGGCACCGACTTCACCCTCACCATTTCAAGGCTGGAA |
| | | CCGGAGGACTTCGCCGTGTACTACTGCCAGCAGTATGGTTCGTCCCCACCCTG |
| | | GACGTTCGGCCAGGGGACTAAGGTCGAGATCAAG |
| 139107- aa | 1023 | EVQLVETGGGVVQPGGSLRLSCAVSGFALSNHGMSWVRRAPGKGLEWVSGIVY |
| VH | | SGSTYYAASVKGRFTISRDNSRNTLYLQMNSLRPEDTAIYYCSAHGGESDVWG |
| | | QGTTVTVSS |
| 139107- aa | 1024 | EIVLTQSPGTLSLSPGERATLSCRASQSVGSTNLAWYQQKPGQAPRLLIYDAS |
| VL | | NRATGIPDRFSGGGSGTDFTLTISRLEPEDFAVYYCQQYGSSPPWTFGQGTKV |
| | | EIK |
| 139107- aa | 1025 | MALPVTALLLPLALLLHAARPEVQLVETGGGVVQPGGSLRLSCAVSGFALSNH |
| Full CAR | | GMSWVRRAPGKGLEWVSGIVYSGSTYYAASVKGRFTISRDNSRNTLYLQMNSL |
| | | RPEDTAIYYCSAHGGESDVWGQGTTVTVSSASGGGGSGGRASGGGGSEIVLTQ |
| | | SPGTLSLSPGERATLSCRASQSVGSTNLAWYQQKPGQAPRLLIYDASNRATGI |
| | | PDRFSGGGSGTDFTLTISRLEPEDFAVYYCQQYGSSPPWTFGQGTKVEIKTTT |
| | | PAPRPPTPAPTIASQPLSLRPEACRPAAGGAVHTRGLDFACDIYIWAPLAGTC |
| | | GVLLLSLVITLYCKRGRKKLLYIFKQPFMRPVQTTQEEDGCSCRFPEEEEGGC |
| | | ELRVKFSRSADAPAYKQGQNQLYNELNLGRREEYDVLDKRRGRDPEMGGKPRR |
| | | KNPQEGLYNELQKDKMAEAYSEIGMKGERRRGKGHDGLYQGLSTATKDTYDAL |
| | | HMQALPPR |
| 139107- nt | 1026 | ATGGCCCTCCCTGTCACCGCCCTGCTGCTTCCGCTGGCTCTTCTGCTCCACGC |
| Full CAR | | CGCTCGGCCCGAAGTGCAATTGGTGGAGACTGGAGGAGGAGTGGTGCAACCTG |
| | | GAGGAAGCCTGAGACTGTCATGCGCGGTGTCGGGCTTCGCCCTCTCCAACCAC |
| | | GGAATGTCCTGGGTCCGCCGGGCCCCTGGGAAAGGACTTGAATGGGTGTCCGG |
| | | CATCGTGTACTCGGGTTCCACCTACTACGCGGCCTCAGTGAAGGGCCGGTTTA |
| | | CTATTAGCCGCGACAACTCCAGAAACACACTGTACCTCCAAATGAACTCGCTG |
| | | CGGCCGGAAGATACCGCTATCTACTACTGCTCCGCCCATGGGGGAGAGTCGGA |
| | | CGTCTGGGGACAGGGCACCACTGTCACTGTGTCCAGCGCTTCCGGCGGTGGTG |
| | | GAAGCGGGGGACGGGCCTCAGGAGGCGGTGGCAGCGAGATTGTGCTGACCCAG |
| | | TCCCCCGGGACCCTGAGCCTGTCCCCGGGAGAAAGGGCCACCCTCTCCTGTCG |
| | | GGCATCCCAGTCCGTGGGGTCTACTAACCTTGCATGGTACCAGCAGAAGCCCG |
| | | GCCAGGCCCCTCGCCTGCTGATCTACGACGCGTCCAATAGAGCCACCGGCATC |
| | | CCGGATCGCTTCAGCGGAGGCGGATCGGGCACCGACTTCACCCTCACCATTTC |
| | | AAGGCTGGAACCGGAGGACTTCGCCGTGTACTACTGCCAGCAGTATGGTTCGT |
| | | CCCCACCCTGGACGTTCGGCCAGGGGACTAAGGTCGAGATCAAGACCACTACC |
| | | CCAGCACCGAGGCCACCCACCCCGGCTCCTACCATCGCCTCCCAGCCTCTGTC |
| | | CCTGCGTCCGGAGGCATGTAGACCCGCAGCTGGTGGGGCCGTGCATACCCGGG |
| | | GTCTTGACTTCGCCTGCGATATCTACATTTGGGCCCCTCTGGCTGGTACTTGC |
| | | GGGGTCCTGCTGCTTTCACTCGTGATCACTCTTTACTGTAAGCGCGGTCGGAA |
| | | GAAGCTGCTGTACATCTTTAAGCAACCCTTCATGAGGCCTGTGCAGACTACTC |
| | | AAGAGGAGGACGGCTGTTCATGCCGGTTCCCAGAGGAGGAGGAAGGCGGCTGC |
| | | GAACTGCGCGTGAAATTCAGCCGCAGCGCAGATGCTCCAGCCTACAAGCAGGG |
| | | GCAGAACCAGCTCTACAACGAACTCAATCTTGGTCGGAGAGAGGAGTACGACG |
| | | TGCTGGACAAGCGGAGAGGACGGGACCCAGAAATGGGCGGGAAGCCGCGCAGA |
| | | AAGAATCCCCAAGAGGGCCTGTACAACGAGCTCCAAAAGGATAAGATGGCAGA |
| | | AGCCTATAGCGAGATTGGTATGAAAGGGGAACGCAGAAGAGGCAAAGGCCACG |
| | | ACGGACTGTACCAGGGACTCAGCACCGCCACCAAGGACACCTATGACGCTCTT |
| | | CACATGCAGGCCCTGCCGCCTCGG |

139108

| | | |
|---|---|---|
| 139108- aa | 1027 | QVQLVESGGGLVKPGGSLRLSCAASGFTFSDYYMSWIRQAPGKGLEWVSYISS |
| ScFv domain | | SGSTIYYADSVKGRFTISRDNAKNSLYLQMNSLRAEDTAVYYCARESGDGMDV |
| | | WGQGTTVTVSSASGGGGSGGRASGGGGSDIQMTQSPSSLSASVGDRVTITCRA |
| | | SQSISSYLNWYQQKPGKAPKLLIYAASSLQSGVPSRFSGSGSGTDFTLTISSL |
| | | QPEDFATYYCQQSYTLAFGQGTKVDIK |
| 139108- nt | 1028 | CAAGTGCAACTCGTGGAATCTGGTGGAGGACTCGTGAAACCTGGAGGATCATT |
| ScFv domain | | GAGACTGTCATGCGCGGCCTCGGGATTCACGTTCTCCGATTACTACATGAGCT |
| | | GGATTCGCCAGGCTCCGGGGAAGGGACTGGAATGGGTGTCCTACATTTCCTCA |
| | | TCCGGCTCCACCATCTACTACGCGGACTCCGTGAAGGGGAGATTCACCATTAG |
| | | CCGCGATAACGCCAAGAACAGCCTGTACCTTCAGATGAACTCCCTGCGGGCTG |
| | | AAGATACTGCCGTCTACTACTGCGCAAGGGAGAGCGGAGATGGGATGGACGTC |
| | | TGGGGACAGGGTACCACTGTGACCGTGTCGTCGGCCTCCGGCGGAGGGGGTTC |
| | | GGGTGGAAGGGCCAGCGGCGGCGGAGGCAGCGACATCCAGATGACCCAGTCCC |
| | | CCTCATCGCTGTCCGCCTCCGTGGGCGACCGCGTCACCATCACATGCCGGGCC |
| | | TCACAGTCGATCTCCTCCTACCTCAATTGGTATCAGCAGAAGCCCGGAAAGGC |
| | | CCCTAAGCTTCTGATCTACGCAGCGTCCTCCCTGCAATCCGGGGTCCCATCTC |
| | | GGTTCTCCGGCTCGGGCAGCGGTACCGACTTCACTCTGACCATCTCGAGCCTG |
| | | CAGCCGGAGGACTTCGCCACTTACTACTGTCAGCAAAGCTACACCCTCGCGTT |
| | | TGGCCAGGGCACCAAAGTGGACATCAAG |
| 139108- aa | 1029 | QVQLVESGGGLVKPGGSLRLSCAASGFTFSDYYMSWIRQAPGKGLEWVSYISS |
| VH | | SGSTIYYADSVKGRFTISRDNAKNSLYLQMNSLRAEDTAVYYCARESGDGMDV |
| | | WGQGTTVTVSS |
| 139108- aa | 1030 | DIQMTQSPSSLSASVGDRVTITCRASQSISSYLNWYQQKPGKAPKLLIYAASS |
| VL | | LQSGVPSRFSGSGSGTDFTLTISSLQPEDFATYYCQQSYTLAFGQGTKVDIK |
| 139108- aa | 1031 | MALPVTALLLPLALLLHAARPQVQLVESGGGLVKPGGSLRLSCAASGFTFSDY |
| Full CAR | | YMSWIRQAPGKGLEWVSYISSSGSTIYYADSVKGRFTISRDNAKNSLYLQMNS |
| | | LRAEDTAVYYCARESGDGMDVWGQGTTVTVSSASGGGGSGGRASGGGGSDIQM |
| | | TQSPSSLSASVGDRVTITCRASQSISSYLNWYQQKPGKAPKLLIYAASSLQSG |
| | | VPSRFSGSGSGTDFTLTISSLQPEDFATYYCQQSYTLAFGQGTKVDIKTTTPA |
| | | PRPPTPAPTIASQPLSLRPEACRPAAGGAVHTRGLDFACDIYIWAPLAGTCGV |
| | | LLLSLVITLYCKRGRKKLLYIFKQPFMRPVQTTQEEDGCSCRFPEEEEGGCEL |
| | | RVKFSRSADAPAYKQGQNQLYNELNLGRREEYDVLDKRRGRDPEMGGKPRRKN |
| | | PQEGLYNELQKDKMAEAYSEIGMKGERRRGKGHDGLYQGLSTATKDTYDALHM |
| | | QALPPR |
| 139108- nt | 1032 | ATGGCCCTCCCTGTCACCGCCCTGCTGCTTCCGCTGGCTCTTCTGCTCCACGC |
| Full CAR | | CGCTCGGCCCCAAGTGCAACTCGTGGAATCTGGTGGAGGACTCGTGAAACCTG |
| | | GAGGATCATTGAGACTGTCATGCGCGGCCTCGGGATTCACGTTCTCCGATTAC |
| | | TACATGAGCTGGATTCGCCAGGCTCCGGGGAAGGGACTGGAATGGGTGTCCTA |
| | | CATTTCCTCATCCGGCTCCACCATCTACTACGCGGACTCCGTGAAGGGGAGAT |
| | | TCACCATTAGCCGCGATAACGCCAAGAACAGCCTGTACCTTCAGATGAACTCC |
| | | CTGCGGGCTGAAGATACTGCCGTCTACTACTGCGCAAGGGAGAGCGGAGATGG |
| | | GATGGACGTCTGGGGACAGGGTACCACTGTGACCGTGTCGTCGGCCTCCGGCG |
| | | GAGGGGGTTCGGGTGGAAGGGCCAGCGGCGGCGGAGGCAGCGACATCCAGATG |
| | | ACCCAGTCCCCCTCATCGCTGTCCGCCTCCGTGGGCGACCGCGTCACCATCAC |
| | | ATGCCGGGCCTCACAGTCGATCTCCTCCTACCTCAATTGGTATCAGCAGAAGC |
| | | CCGGAAAGGCCCCTAAGCTTCTGATCTACGCAGCGTCCTCCCTGCAATCCGGG |
| | | GTCCCATCTCGGTTCTCCGGCTCGGGCAGCGGTACCGACTTCACTCTGACCAT |
| | | CTCGAGCCTGCAGCCGGAGGACTTCGCCACTTACTACTGTCAGCAAAGCTACA |
| | | CCCTCGCGTTTGGCCAGGGCACCAAAGTGGACATCAAGACCACTACCCCAGCA |
| | | CCGAGGCCACCCACCCCGGCTCCTACCATCGCCTCCCAGCCTCTGTCCCTGCG |
| | | TCCGGAGGCATGTAGACCCGCAGCTGGTGGGGCCGTGCATACCCGGGGTCTTG |
| | | ACTTCGCCTGCGATATCTACATTTGGGCCCCTCTGGCTGGTACTTGCGGGGTC |
| | | CTGCTGCTTTCACTCGTGATCACTCTTTACTGTAAGCGCGGTCGGAAGAAGCT |
| | | GCTGTACATCTTTAAGCAACCCTTCATGAGGCCTGTGCAGACTACTCAAGAGG |
| | | AGGACGGCTGTTCATGCCGGTTCCCAGAGGAGGAGGAAGGCGGCTGCGAACTG |
| | | CGCGTGAAATTCAGCCGCAGCGCAGATGCTCCAGCCTACAAGCAGGGGCAGAA |
| | | CCAGCTCTACAACGAACTCAATCTTGGTCGGAGAGAGGAGTACGACGTGCTGG |
| | | ACAAGCGGAGAGGACGGGACCCAGAAATGGGCGGGAAGCCGCGCAGAAAGAAT |
| | | CCCCAAGAGGGCCTGTACAACGAGCTCCAAAAGGATAAGATGGCAGAAGCCTA |
| | | TAGCGAGATTGGTATGAAAGGGGAACGCAGAAGAGGCAAAGGCCACGACGGAC |
| | | TGTACCAGGGACTCAGCACCGCCACCAAGGACACCTATGACGCTCTTCACATG |
| | | CAGGCCCTGCCGCCTCGG |

139110

| | | |
|---|---|---|
| 139110- aa | 1033 | QVQLVQSGGGLVKPGGSLRLSCAASGFTFSDYYMSWIRQAPGKGLEWVSYISS |
| ScFv domain | | SGNTIYYADSVKGRFTISRDNAKNSLYLQMNSLRAEDTAVYYCARSTMVREDY |
| | | WGQGTLVTVSSASGGGGSGGRASGGGGSDIVLTQSPLSLPVTLGQPASISCKS |
| | | SESLVHNSGKTYLNWFHQRPGQSPRRLIYEVSNRDSGVPDRFTGSGSGTDFTL |
| | | KISRVEAEDVGVYYCMQGTHWPGTFGQGTKLEIK |
| 139110- nt | 1034 | CAAGTGCAACTGGTGCAAAGCGGAGGAGGATTGGTCAAACCCGGAGGAAGCCT |
| ScFv domain | | GAGACTGTCATGCGCGGCCTCTGGATTCACCTTCTCCGATTACTACATGTCAT |
| | | GGATCAGACAGGCCCCGGGGAAGGGCCTCGAATGGGTGTCCTACATCTCGTCC |
| | | TCCGGGAACACCATCTACTACGCCGACAGCGTGAAGGGCCGCTTTACCATTTC |
| | | CCGCGACAACGCAAAGAACTCGCTGTACCTTCAGATGAATTCCCTGCGGGCTG |
| | | AAGATACCGCGGTGTACTATTGCGCCCGGTCCACTATGGTCCGGGAGGACTAC |
| | | TGGGGACAGGGCACACTCGTGACCGTGTCCAGCGCGAGCGGGGGTGGAGGCAG |
| | | CGGTGGACGCGCCTCCGGCGGCGGCGGTTCAGACATCGTGCTGACTCAGTCGC |
| | | CCCTGTCGCTGCCGGTCACCCTGGGCCAACCGGCCTCAATTAGCTGCAAGTCC |
| | | TCGGAGAGCCTGGTGCACAACTCAGGAAAGACTTACCTGAACTGGTTCCATCA |
| | | GCGGCCTGGACAGTCCCCACGGAGGCTCATCTATGAAGTGTCCAACAGGGATT |
| | | CGGGGGTGCCCGACCGCTTCACTGGCTCCGGGTCCGGCACCGACTTCACCTTG |
| | | AAAATCTCCAGAGTGGAAGCCGAGGACGTGGGCGTGTACTACTGTATGCAGGG |
| | | TACCCACTGGCCTGGAACCTTTGGACAAGGAACTAAGCTCGAGATTAAG |
| 139110- aa | 1035 | QVQLVQSGGGLVKPGGSLRLSCAASGFTFSDYYMSWIRQAPGKGLEWVSYISS |
| VH | | SGNTIYYADSVKGRFTISRDNAKNSLYLQMNSLRAEDTAVYYCARSTMVREDY |
| | | WGQGTLVTVSS |
| 139110- aa | 1036 | DIVLTQSPLSLPVTLGQPASISCKSSESLVHNSGKTYLNWFHQRPGQSPRRLI |
| VL | | YEVSNRDSGVPDRFTGSGSGTDFTLKISRVEAEDVGVYYCMQGTHWPGTFGQG |
| | | TKLEIK |
| 139110- aa | 1037 | MALPVTALLLPLALLLHAARPQVQLVQSGGGLVKPGGSLRLSCAASGFTFSDY |
| Full CAR | | YMSWIRQAPGKGLEWVSYISSSGNTIYYADSVKGRFTISRDNAKNSLYLQMNS |
| | | LRAEDTAVYYCARSTMVREDYWGQGTLVTVSSASGGGGSGGRASGGGGSDIVL |
| | | TQSPLSLPVTLGQPASISCKSSESLVHNSGKTYLNWFHQRPGQSPRRLIYEVS |
| | | NRDSGVPDRFTGSGSGTDFTLKISRVEAEDVGVYYCMQGTHWPGTFGQGTKLE |
| | | IKTTTPAPRPPTPAPTIASQPLSLRPEACRPAAGGAVHTRGLDFACDIYIWAP |
| | | LAGTCGVLLLSLVITLYCKRGRKKLLYIFKQPFMRPVQTTQEEDGCSCRFPEE |
| | | EEGGCELRVKFSRSADAPAYKQGQNQLYNELNLGRREEYDVLDKRRGRDPEMG |
| | | GKPRRKNPQEGLYNELQKDKMAEAYSEIGMKGERRRGKGHDGLYQGLSTATKD |
| | | TYDALHMQALPPR |
| 139110- nt | 1038 | ATGGCCCTCCCTGTCACCGCCCTGCTGCTTCCGCTGGCTCTTCTGCTCCACGC |
| Full CAR | | CGCTCGGCCCCAAGTGCAACTGGTGCAAAGCGGAGGAGGATTGGTCAAACCCG |
| | | GAGGAAGCCTGAGACTGTCATGCGCGGCCTCTGGATTCACCTTCTCCGATTAC |
| | | TACATGTCATGGATCAGACAGGCCCCGGGGAAGGGCCTCGAATGGGTGTCCTA |
| | | CATCTCGTCCTCCGGGAACACCATCTACTACGCCGACAGCGTGAAGGGCCGCT |
| | | TTACCATTTCCCGCGACAACGCAAAGAACTCGCTGTACCTTCAGATGAATTCC |
| | | CTGCGGGCTGAAGATACCGCGGTGTACTATTGCGCCCGGTCCACTATGGTCCG |
| | | GGAGGACTACTGGGGACAGGGCACACTCGTGACCGTGTCCAGCGCGAGCGGGG |
| | | GTGGAGGCAGCGGTGGACGCGCCTCCGGCGGCGGCGGTTCAGACATCGTGCTG |
| | | ACTCAGTCGCCCCTGTCGCTGCCGGTCACCCTGGGCCAACCGGCCTCAATTAG |
| | | CTGCAAGTCCTCGGAGAGCCTGGTGCACAACTCAGGAAAGACTTACCTGAACT |
| | | GGTTCCATCAGCGGCCTGGACAGTCCCCACGGAGGCTCATCTATGAAGTGTCC |
| | | AACAGGGATTCGGGGGTGCCCGACCGCTTCACTGGCTCCGGGTCCGGCACCGA |
| | | CTTCACCTTGAAAATCTCCAGAGTGGAAGCCGAGGACGTGGGCGTGTACTACT |
| | | GTATGCAGGGTACCCACTGGCCTGGAACCTTTGGACAAGGAACTAAGCTCGAG |
| | | ATTAAGACCACTACCCCAGCACCGAGGCCACCCACCCCGGCTCCTACCATCGC |
| | | CTCCCAGCCTCTGTCCCTGCGTCCGGAGGCATGTAGACCCGCAGCTGGTGGGG |
| | | CCGTGCATACCCGGGGTCTTGACTTCGCCTGCGATATCTACATTTGGGCCCCT |
| | | CTGGCTGGTACTTGCGGGGTCCTGCTGCTTTCACTCGTGATCACTCTTTACTG |
| | | TAAGCGCGGTCGGAAGAAGCTGCTGTACATCTTTAAGCAACCCTTCATGAGGC |
| | | CTGTGCAGACTACTCAAGAGGAGGACGGCTGTTCATGCCGGTTCCCAGAGGAG |
| | | GAGGAAGGCGGCTGCGAACTGCGCGTGAAATTCAGCCGCAGCGCAGATGCTCC |
| | | AGCCTACAAGCAGGGGCAGAACCAGCTCTACAACGAACTCAATCTTGGTCGGA |
| | | GAGAGGAGTACGACGTGCTGGACAAGCGGAGAGGACGGGACCCAGAAATGGGC |
| | | GGGAAGCCGCGCAGAAAGAATCCCCAAGAGGGCCTGTACAACGAGCTCCAAAA |
| | | GGATAAGATGGCAGAAGCCTATAGCGAGATTGGTATGAAAGGGGAACGCAGAA |
| | | GAGGCAAAGGCCACGACGGACTGTACCAGGGACTCAGCACCGCCACCAAGGAC |
| | | ACCTATGACGCTCTTCACATGCAGGCCCTGCCGCCTCGG |

139112

| | | |
|---|---|---|
| 139112- aa | 1039 | QVQLVESGGGLVQPGGSLRLSCAVSGFALSNHGMSWVRRAPGKGLEWVSGIVY |
| ScFv domain | | SGSTYYAASVKGRFTISRDNSRNTLYLQMNSLRPEDTAIYYCSAHGGESDVWG |
| | | QGTTVTVSSASGGGGSGGRASGGGGSDIRLTQSPSPLSASVGDRVTITCQASE |
| | | DINKFLNWYHQTPGKAPKLLIYDASTLQTGVPSRFSGSGSGTDFTLTINSLQP |
| | | EDIGTYYCQQYESLPLTFGGGTKVEIK |
| 139112- nt | 1040 | CAAGTGCAACTCGTGGAATCTGGTGGAGGACTCGTGCAACCCGGTGGAAGCCT |
| ScFv domain | | TAGGCTGTCGTGCGCCGTCAGCGGGTTTGCTCTGAGCAACCATGGAATGTCCT |
| | | GGGTCCGCCGGGCACCGGGAAAAGGGCTGGAATGGGTGTCCGGCATCGTGTAC |
| | | AGCGGGTCAACCTATTACGCCGCGTCCGTGAAGGGCAGATTCACTATCTCAAG |
| | | AGACAACAGCCGGAACACCCTGTACTTGCAAATGAATTCCCTGCGCCCCGAGG |
| | | ACACCGCCATCTACTACTGCTCCGCCCACGGAGGAGAGTCGGACGTGTGGGGC |
| | | CAGGGAACGACTGTGACTGTGTCCAGCGCATCAGGAGGGGGTGGTTCGGGCGG |
| | | CCGGGCCTCGGGGGGAGGAGGTTCCGACATTCGGCTGACCCAGTCCCCGTCCC |
| | | CACTGTCGGCCTCCGTCGGCGACCGCGTGACCATCACTTGTCAGGCGTCCGAG |
| | | GACATTAACAAGTTCCTGAACTGGTACCACCAGACCCCTGGAAAGGCCCCCAA |
| | | GCTGCTGATCTACGATGCCTCGACCCTTCAAACTGGAGTGCCTAGCCGGTTCT |
| | | CCGGGTCCGGCTCCGGCACTGATTTCACTCTGACCATCAACTCATTGCAGCCG |
| | | GAAGATATCGGGACCTACTATTGCCAGCAGTACGAATCCCTCCCGCTCACATT |
| | | CGGCGGGGGAACCAAGGTCGAGATTAAG |
| 139112- aa | 1041 | QVQLVESGGGLVQPGGSLRLSCAVSGFALSNHGMSWVRRAPGKGLEWVSGIVY |
| VH | | SGSTYYAASVKGRFTISRDNSRNTLYLQMNSLRPEDTAIYYCSAHGGESDVWG |
| | | QGTTVTVSS |
| 139112- aa | 1042 | DIRLTQSPSPLSASVGDRVTITCQASEDINKFLNWYHQTPGKAPKLLIYDAST |
| VL | | LQTGVPSRFSGSGSGTDFTLTINSLQPEDIGTYYCQQYESLPLTFGGGTKVEI |
| | | K |
| 139112- aa | 1043 | MALPVTALLLPLALLLHAARPQVQLVESGGGLVQPGGSLRLSCAVSGFALSNH |
| Full CAR | | GMSWVRRAPGKGLEWVSGIVYSGSTYYAASVKGRFTISRDNSRNTLYLQMNSL |
| | | RPEDTAIYYCSAHGGESDVWGQGTTVTVSSASGGGGSGGRASGGGGSDIRLTQ |
| | | SPSPLSASVGDRVTITCQASEDINKFLNWYHQTPGKAPKLLIYDASTLQTGVP |
| | | SRFSGSGSGTDFTLTINSLQPEDIGTYYCQQYESLPLTFGGGTKVEIKTTTPA |
| | | PRPPTPAPTIASQPLSLRPEACRPAAGGAVHTRGLDFACDIYIWAPLAGTCGV |
| | | LLLSLVITLYCKRGRKKLLYIFKQPFMRPVQTTQEEDGCSCRFPEEEEGGCEL |
| | | RVKFSRSADAPAYKQGQNQLYNELNLGRREEYDVLDKRRGRDPEMGGKPRRKN |
| | | PQEGLYNELQKDKMAEAYSEIGMKGERRRGKGHDGLYQGLSTATKDTYDALHM |
| | | QALPPR |
| 139112- nt | 1044 | ATGGCCCTCCCTGTCACCGCCCTGCTGCTTCCGCTGGCTCTTCTGCTCCACGC |
| Full CAR | | CGCTCGGCCCCAAGTGCAACTCGTGGAATCTGGTGGAGGACTCGTGCAACCCG |
| | | GTGGAAGCCTTAGGCTGTCGTGCGCCGTCAGCGGGTTTGCTCTGAGCAACCAT |
| | | GGAATGTCCTGGGTCCGCCGGGCACCGGGAAAAGGGCTGGAATGGGTGTCCGG |
| | | CATCGTGTACAGCGGGTCAACCTATTACGCCGCGTCCGTGAAGGGCAGATTCA |
| | | CTATCTCAAGAGACAACAGCCGGAACACCCTGTACTTGCAAATGAATTCCCTG |
| | | CGCCCCGAGGACACCGCCATCTACTACTGCTCCGCCCACGGAGGAGAGTCGGA |
| | | CGTGTGGGGCCAGGGAACGACTGTGACTGTGTCCAGCGCATCAGGAGGGGGTG |
| | | GTTCGGGCGGCCGGGCCTCGGGGGGAGGAGGTTCCGACATTCGGCTGACCCAG |
| | | TCCCCGTCCCCACTGTCGGCCTCCGTCGGCGACCGCGTGACCATCACTTGTCA |
| | | GGCGTCCGAGGACATTAACAAGTTCCTGAACTGGTACCACCAGACCCCTGGAA |
| | | AGGCCCCCAAGCTGCTGATCTACGATGCCTCGACCCTTCAAACTGGAGTGCCT |
| | | AGCCGGTTCTCCGGGTCCGGCTCCGGCACTGATTTCACTCTGACCATCAACTC |
| | | ATTGCAGCCGGAAGATATCGGGACCTACTATTGCCAGCAGTACGAATCCCTCC |
| | | CGCTCACATTCGGCGGGGGAACCAAGGTCGAGATTAAGACCACTACCCCAGCA |
| | | CCGAGGCCACCCACCCCGGCTCCTACCATCGCCTCCCAGCCTCTGTCCCTGCG |
| | | TCCGGAGGCATGTAGACCCGCAGCTGGTGGGGCCGTGCATACCCGGGGTCTTG |
| | | ACTTCGCCTGCGATATCTACATTTGGGCCCCTCTGGCTGGTACTTGCGGGGTC |
| | | CTGCTGCTTTCACTCGTGATCACTCTTTACTGTAAGCGCGGTCGGAAGAAGCT |
| | | GCTGTACATCTTTAAGCAACCCTTCATGAGGCCTGTGCAGACTACTCAAGAGG |
| | | AGGACGGCTGTTCATGCCGGTTCCCAGAGGAGGAGGAAGGCGGCTGCGAACTG |
| | | CGCGTGAAATTCAGCCGCAGCGCAGATGCTCCAGCCTACAAGCAGGGGCAGAA |
| | | CCAGCTCTACAACGAACTCAATCTTGGTCGGAGAGAGGAGTACGACGTGCTGG |
| | | ACAAGCGGAGAGGACGGGACCCAGAAATGGGCGGGAAGCCGCGCAGAAAGAAT |
| | | CCCCAAGAGGGCCTGTACAACGAGCTCCAAAAGGATAAGATGGCAGAAGCCTA |
| | | TAGCGAGATTGGTATGAAAGGGGAACGCAGAAGAGGCAAAGGCCACGACGGAC |
| | | TGTACCAGGGACTCAGCACCGCCACCAAGGACACCTATGACGCTCTTCACATG |
| | | CAGGCCCTGCCGCCTCGG |

139113

| | | |
|---|---|---|
| 139113- aa | 1045 | EVQLVETGGGLVQPGGSLRLSCAVSGFALSNHGMSWVRRAPGKGLEWVSGIVY |
| ScFv domain | | SGSTYYAASVKGRFTISRDNSRNTLYLQMNSLRPEDTAIYYCSAHGGESDVWG |
| | | QGTTVTVSSASGGGGSGGRASGGGGSETTLTQSPATLSVSPGERATLSCRASQ |
| | | SVGSNLAWYQQKPGQGPRLLIYGASTRATGIPARFSGSGSGTEFTLTISSLQP |
| | | EDFAVYYCQQYNDWLPVTFGQGTKVEIK |
| 139113- nt | 1046 | GAAGTGCAATTGGTGGAAACTGGAGGAGGACTTGTGCAACCTGGAGGATCATT |
| ScFv domain | | GCGGCTCTCATGCGCTGTCTCCGGCTTCGCCCTGTCAAATCACGGGATGTCGT |
| | | GGGTCAGACGGGCCCCGGGAAAGGGTCTGGAATGGGTGTCGGGGATTGTGTAC |
| | | AGCGGCTCCACCTACTACGCCGCTTCGGTCAAGGGCCGCTTCACTATTTCACG |
| | | GGACAACAGCCGCAACACCCTCTATCTGCAAATGAACTCTCTCCGCCCGGAGG |
| | | ATACCGCCATCTACTACTGCTCCGCACACGGCGGCGAATCCGACGTGTGGGGA |
| | | CAGGGAACCACTGTCACCGTGTCGTCCGCATCCGGTGGCGGAGGATCGGGTGG |
| | | CCGGGCCTCCGGGGGCGGCGGCAGCGAGACTACCCTGACCCAGTCCCCTGCCA |
| | | CTCTGTCCGTGAGCCCGGGAGAGAGAGCCACCCTTAGCTGCCGGGCCAGCCAG |
| | | AGCGTGGGCTCCAACCTGGCCTGGTACCAGCAGAAGCCAGGACAGGGTCCCAG |
| | | GCTGCTGATCTACGGAGCCTCCACTCGCGCGACCGGCATCCCCGCGAGGTTCT |
| | | CCGGGTCGGGTTCCGGGACCGAGTTCACCCTGACCATCTCCTCCCTCCAACCG |
| | | GAGGACTTCGCGGTGTACTACTGTCAGCAGTACAACGATTGGCTGCCCGTGAC |
| | | ATTTGGACAGGGGACGAAGGTGGAAATCAAA |
| 139113- aa | 1047 | EVQLVETGGGLVQPGGSLRLSCAVSGFALSNHGMSWVRRAPGKGLEWVSGIVY |
| VH | | SGSTYYAASVKGRFTISRDNSRNTLYLQMNSLRPEDTAIYYCSAHGGESDVWG |
| | | QGTTVTVSS |
| 139113- aa | 1048 | ETTLTQSPATLSVSPGERATLSCRASQSVGSNLAWYQQKPGQGPRLLIYGAST |
| VL | | RATGIPARFSGSGSGTEFTLTISSLQPEDFAVYYCQQYNDWLPVTFGQGTKVE |
| | | IK |
| 139113- aa | 1049 | MALPVTALLLPLALLLHAARPEVQLVETGGGLVQPGGSLRLSCAVSGFALSNH |
| Full CAR | | GMSWVRRAPGKGLEWVSGIVYSGSTYYAASVKGRFTISRDNSRNTLYLQMNSL |
| | | RPEDTAIYYCSAHGGESDVWGQGTTVTVSSASGGGGSGGRASGGGGSETTLTQ |
| | | SPATLSVSPGERATLSCRASQSVGSNLAWYQQKPGQGPRLLIYGASTRATGIP |
| | | ARFSGSGSGTEFTLTISSLQPEDFAVYYCQQYNDWLPVTFGQGTKVEIKTTTP |
| | | APRPPTPAPTIASQPLSLRPEACRPAAGGAVHTRGLDFACDIYIWAPLAGTCG |
| | | VLLLSLVITLYCKRGRKKLLYIFKQPFMRPVQTTQEEDGCSCRFPEEEEGGCE |
| | | LRVKFSRSADAPAYKQGQNQLYNELNLGRREEYDVLDKRRGRDPEMGGKPRRK |
| | | NPQEGLYNELQKDKMAEAYSEIGMKGERRRGKGHDGLYQGLSTATKDTYDALH |
| | | MQALPPR |
| 139113- nt | 1050 | ATGGCCCTCCCTGTCACCGCCCTGCTGCTTCCGCTGGCTCTTCTGCTCCACGC |
| Full CAR | | CGCTCGGCCCGAAGTGCAATTGGTGGAAACTGGAGGAGGACTTGTGCAACCTG |
| | | GAGGATCATTGCGGCTCTCATGCGCTGTCTCCGGCTTCGCCCTGTCAAATCAC |
| | | GGGATGTCGTGGGTCAGACGGGCCCCGGGAAAGGGTCTGGAATGGGTGTCGGG |
| | | GATTGTGTACAGCGGCTCCACCTACTACGCCGCTTCGGTCAAGGGCCGCTTCA |
| | | CTATTTCACGGGACAACAGCCGCAACACCCTCTATCTGCAAATGAACTCTCTC |
| | | CGCCCGGAGGATACCGCCATCTACTACTGCTCCGCACACGGCGGCGAATCCGA |
| | | CGTGTGGGGACAGGGAACCACTGTCACCGTGTCGTCCGCATCCGGTGGCGGAG |
| | | GATCGGGTGGCCGGGCCTCCGGGGGCGGCGGCAGCGAGACTACCCTGACCCAG |
| | | TCCCCTGCCACTCTGTCCGTGAGCCCGGGAGAGAGAGCCACCCTTAGCTGCCG |
| | | GGCCAGCCAGAGCGTGGGCTCCAACCTGGCCTGGTACCAGCAGAAGCCAGGAC |
| | | AGGGTCCCAGGCTGCTGATCTACGGAGCCTCCACTCGCGCGACCGGCATCCCC |
| | | GCGAGGTTCTCCGGGTCGGGTTCCGGGACCGAGTTCACCCTGACCATCTCCTC |
| | | CCTCCAACCGGAGGACTTCGCGGTGTACTACTGTCAGCAGTACAACGATTGGC |
| | | TGCCCGTGACATTTGGACAGGGGACGAAGGTGGAAATCAAAACCACTACCCCA |
| | | GCACCGAGGCCACCCACCCCGGCTCCTACCATCGCCTCCCAGCCTCTGTCCCT |
| | | GCGTCCGGAGGCATGTAGACCCGCAGCTGGTGGGGCCGTGCATACCCGGGGTC |
| | | TTGACTTCGCCTGCGATATCTACATTTGGGCCCCTCTGGCTGGTACTTGCGGG |
| | | GTCCTGCTGCTTTCACTCGTGATCACTCTTTACTGTAAGCGCGGTCGGAAGAA |
| | | GCTGCTGTACATCTTTAAGCAACCCTTCATGAGGCCTGTGCAGACTACTCAAG |
| | | AGGAGGACGGCTGTTCATGCCGGTTCCCAGAGGAGGAGGAAGGCGGCTGCGAA |
| | | CTGCGCGTGAAATTCAGCCGCAGCGCAGATGCTCCAGCCTACAAGCAGGGGCA |
| | | GAACCAGCTCTACAACGAACTCAATCTTGGTCGGAGAGAGGAGTACGACGTGC |
| | | TGGACAAGCGGAGAGGACGGGACCCAGAAATGGGCGGGAAGCCGCGCAGAAAG |
| | | AATCCCCAAGAGGGCCTGTACAACGAGCTCCAAAAGGATAAGATGGCAGAAGC |
| | | CTATAGCGAGATTGGTATGAAAGGGGAACGCAGAAGAGGCAAAGGCCACGACG |
| | | GACTGTACCAGGGACTCAGCACCGCCACCAAGGACACCTATGACGCTCTTCAC |
| | | ATGCAGGCCCTGCCGCCTCGG |

139114

| | | |
|---|---|---|
| 139114- aa | 1051 | EVQLVESGGGLVQPGGSLRLSCAVSGFALSNHGMSWVRRAPGKGLEWVSGIVY |
| ScFv domain | | SGSTYYAASVKGRFTISRDNSRNTLYLQMNSLRPEDTAIYYCSAHGGESDVWG |
| | | QGTTVTVSSASGGGGSGGRASGGGGSEIVLTQSPGTLSLSPGERATLSCRASQ |
| | | SIGSSSLAWYQQKPGQAPRLLMYGASSRASGIPDRFSGSGSGTDFTLTISRLE |
| | | PEDFAVYYCQQYAGSPPFTFGQGTKVEIK |
| 139114- nt | 1052 | GAAGTGCAATTGGTGGAATCTGGTGGAGGACTTGTGCAACCTGGAGGATCACT |
| ScFv domain | | GAGACTGTCATGCGCGGTGTCCGGTTTTGCCCTGAGCAATCATGGGATGTCGT |
| | | GGGTCCGGCGCGCCCCCGGAAAGGGTCTGGAATGGGTGTCGGGTATCGTCTAC |
| | | TCCGGGAGCACTTACTACGCCGCGAGCGTGAAGGGCCGCTTCACCATTTCCCG |
| | | CGATAACTCCCGCAACACCCTGTACTTGCAAATGAACTCGCTCCGGCCTGAGG |
| | | ACACTGCCATCTACTACTGCTCCGCACACGGAGGAGAATCCGACGTGTGGGGC |
| | | CAGGGAACTACCGTGACCGTCAGCAGCGCCTCCGGCGGCGGGGGCTCAGGCGG |
| | | ACGGGCTAGCGGCGGCGGTGGCTCCGAGATCGTGCTGACCCAGTCGCCTGGCA |
| | | CTCTCTCGCTGAGCCCCGGGGAAAGGGCAACCCTGTCCTGTCGGGCCAGCCAG |
| | | TCCATTGGATCATCCTCCCTCGCCTGGTATCAGCAGAAACCGGGACAGGCTCC |
| | | GCGGCTGCTTATGTATGGGGCCAGCTCAAGAGCCTCCGGCATTCCCGACCGGT |
| | | TCTCCGGGTCCGGTTCCGGCACCGATTTCACCCTGACTATCTCGAGGCTGGAG |
| | | CCAGAGGACTTCGCCGTGTACTACTGCCAGCAGTACGCGGGGTCCCCGCCGTT |
| | | CACGTTCGGACAGGGAACCAAGGTCGAGATCAAG |
| 139114- aa | 1053 | EVQLVESGGGLVQPGGSLRLSCAVSGFALSNHGMSWVRRAPGKGLEWVSGIVY |
| VH | | SGSTYYAASVKGRFTISRDNSRNTLYLQMNSLRPEDTAIYYCSAHGGESDVWG |
| | | QGTTVTVSS |
| 139114- aa | 1054 | EIVLTQSPGTLSLSPGERATLSCRASQSIGSSSLAWYQQKPGQAPRLLMYGAS |
| VL | | SRASGIPDRFSGSGSGTDFTLTISRLEPEDFAVYYCQQYAGSPPFTFGQGTKV |
| | | EIK |
| 139114- aa | 1055 | MALPVTALLLPLALLLHAARPEVQLVESGGGLVQPGGSLRLSCAVSGFALSNH |
| Full CAR | | GMSWVRRAPGKGLEWVSGIVYSGSTYYAASVKGRFTISRDNSRNTLYLQMNSL |
| | | RPEDTAIYYCSAHGGESDVWGQGTTVTVSSASGGGGSGGRASGGGGSEIVLTQ |
| | | SPGTLSLSPGERATLSCRASQSIGSSSLAWYQQKPGQAPRLLMYGASSRASGI |
| | | PDRFSGSGSGTDFTLTISRLEPEDFAVYYCQQYAGSPPFTFGQGTKVEIKTTT |
| | | PAPRPPTPAPTIASQPLSLRPEACRPAAGGAVHTRGLDFACDIYIWAPLAGTC |
| | | GVLLLSLVITLYCKRGRKKLLYIFKQPFMRPVQTTQEEDGCSCRFPEEEEGGC |
| | | ELRVKFSRSADAPAYKQGQNQLYNELNLGRREEYDVLDKRRGRDPEMGGKPRR |
| | | KNPQEGLYNELQKDKMAEAYSEIGMKGERRRGKGHDGLYQGLSTATKDTYDAL |
| | | HMQALPPR |
| 139114- nt | 1056 | ATGGCCCTCCCTGTCACCGCCCTGCTGCTTCCGCTGGCTCTTCTGCTCCACGC |
| Full CAR | | CGCTCGGCCCGAAGTGCAATTGGTGGAATCTGGTGGAGGACTTGTGCAACCTG |
| | | GAGGATCACTGAGACTGTCATGCGCGGTGTCCGGTTTTGCCCTGAGCAATCAT |
| | | GGGATGTCGTGGGTCCGGCGCGCCCCCGGAAAGGGTCTGGAATGGGTGTCGGG |
| | | TATCGTCTACTCCGGGAGCACTTACTACGCCGCGAGCGTGAAGGGCCGCTTCA |
| | | CCATTTCCCGCGATAACTCCCGCAACACCCTGTACTTGCAAATGAACTCGCTC |
| | | CGGCCTGAGGACACTGCCATCTACTACTGCTCCGCACACGGAGGAGAATCCGA |
| | | CGTGTGGGGCCAGGGAACTACCGTGACCGTCAGCAGCGCCTCCGGCGGCGGGG |
| | | GCTCAGGCGGACGGGCTAGCGGCGGCGGTGGCTCCGAGATCGTGCTGACCCAG |
| | | TCGCCTGGCACTCTCTCGCTGAGCCCCGGGGAAAGGGCAACCCTGTCCTGTCG |
| | | GGCCAGCCAGTCCATTGGATCATCCTCCCTCGCCTGGTATCAGCAGAAACCGG |
| | | GACAGGCTCCGCGGCTGCTTATGTATGGGGCCAGCTCAAGAGCCTCCGGCATT |
| | | CCCGACCGGTTCTCCGGGTCCGGTTCCGGCACCGATTTCACCCTGACTATCTC |
| | | GAGGCTGGAGCCAGAGGACTTCGCCGTGTACTACTGCCAGCAGTACGCGGGGT |
| | | CCCCGCCGTTCACGTTCGGACAGGGAACCAAGGTCGAGATCAAGACCACTACC |
| | | CCAGCACCGAGGCCACCCACCCCGGCTCCTACCATCGCCTCCCAGCCTCTGTC |
| | | CCTGCGTCCGGAGGCATGTAGACCCGCAGCTGGTGGGGCCGTGCATACCCGGG |
| | | GTCTTGACTTCGCCTGCGATATCTACATTTGGGCCCCTCTGGCTGGTACTTGC |
| | | GGGGTCCTGCTGCTTTCACTCGTGATCACTCTTTACTGTAAGCGCGGTCGGAA |
| | | GAAGCTGCTGTACATCTTTAAGCAACCCTTCATGAGGCCTGTGCAGACTACTC |
| | | AAGAGGAGGACGGCTGTTCATGCCGGTTCCCAGAGGAGGAGGAAGGCGGCTGC |
| | | GAACTGCGCGTGAAATTCAGCCGCAGCGCAGATGCTCCAGCCTACAAGCAGGG |
| | | GCAGAACCAGCTCTACAACGAACTCAATCTTGGTCGGAGAGAGGAGTACGACG |
| | | TGCTGGACAAGCGGAGAGGACGGGACCCAGAAATGGGCGGGAAGCCGCGCAGA |
| | | AAGAATCCCCAAGAGGGCCTGTACAACGAGCTCCAAAAGGATAAGATGGCAGA |
| | | AGCCTATAGCGAGATTGGTATGAAAGGGGAACGCAGAAGAGGCAAAGGCCACG |
| | | ACGGACTGTACCAGGGACTCAGCACCGCCACCAAGGACACCTATGACGCTCTT |
| | | CACATGCAGGCCCTGCCGCCTCGG |

149362

| | | |
|---|---|---|
| 149362-aa | 1057 | QVQLQESGPGLVKPSETLSLTCTVSGGSISSSYYYWGWIRQPPGKGLEWIGSI |
| ScFv domain | | YYSGSAYYNPSLKSRVTISVDTSKNQFSLRLSSVTAADTAVYYCARHWQEWPD |
| | | AFDIWGQGTMVTVSSGGGGSGGGGSGGGGSETTLTQSPAFMSATPGDKVIISC |
| | | KASQDIDDAMNWYQQKPGEAPLFIIQSATSPVPGIPPRFSGSGFGTDFSLTIN |
| | | NIESEDAAYYFCLQHDNFPLTFGQGTKLEIK |
| 149362-nt ScFv | 1058 | CAAGTGCAGCTTCAGGAAAGCGGACCGGGCCTGGTCAAGCCATCCGAAACTCT |
| domain | | CTCCCTGACTTGCACTGTGTCTGGCGGTTCCATCTCATCGTCGTACTACTACT |
| | | GGGGCTGGATTAGGCAGCCGCCCGGAAAGGGACTGGAGTGGATCGGAAGCATC |
| | | TACTATTCCGGCTCGGCGTACTACAACCCTAGCCTCAAGTCGAGAGTGACCAT |
| | | CTCCGTGGATACCTCCAAGAACCAGTTTTCCCTGCGCCTGAGCTCCGTGACCG |
| | | CCGCTGACACCGCCGTGTACTACTGTGCTCGGCATTGGCAGGAATGGCCCGAT |
| | | GCCTTCGACATTTGGGGCCAGGGCACTATGGTCACTGTGTCATCCGGGGGTGG |
| | | AGGCAGCGGGGGAGGAGGGTCCGGGGGGGGAGGTTCAGAGACAACCTTGACCC |
| | | AGTCACCCGCATTCATGTCCGCCACTCCGGGAGACAAGGTCATCATCTCGTGC |
| | | AAAGCGTCCCAGGATATCGACGATGCCATGAATTGGTACCAGCAGAAGCCTGG |
| | | CGAAGCGCCGCTGTTCATTATCCAATCCGCAACCTCGCCCGTGCCTGGAATCC |
| | | CACCGCGGTTCAGCGGCAGCGGTTTCGGAACCGACTTTTCCCTGACCATTAAC |
| | | AACATTGAGTCCGAGGACGCCGCCTACTACTTCTGCCTGCAACACGACAACTT |
| | | CCCTCTCACGTTCGGCCAGGGAACCAAGCTGGAAATCAAG |
| 149362-aa VH | 1059 | QVQLQESGPGLVKPSETLSLTCTVSGGSISSSYYYWGWIRQPPGKGLEWIGSI |
| | | YYSGSAYYNPSLKSRVTISVDTSKNQFSLRLSSVTAADTAVYYCARHWQEWPD |
| | | AFDIWGQGTMVTVSS |
| 149362-aa VL | 1060 | ETTLTQSPAFMSATPGDKVIISCKASQDIDDAMNWYQQKPGEAPLFIIQSATS |
| | | PVPGIPPRFSGSGFGTDFSLTINNIESEDAAYYFCLQHDNFPLTFGQGTKLEI |
| | | K |
| 149362-aa Full | 1061 | MALPVTALLLPLALLLHAARPQVQLQESGPGLVKPSETLSLTCTVSGGSISSS |
| CAR | | YYYWGWIRQPPGKGLEWIGSIYYSGSAYYNPSLKSRVTISVDTSKNQFSLRLS |
| | | SVTAADTAVYYCARHWQEWPDAFDIWGQGTMVTVSSGGGGSGGGGSGGGGSET |
| | | TLTQSPAFMSATPGDKVIISCKASQDIDDAMNWYQQKPGEAPLFIIQSATSPV |
| | | PGIPPRFSGSGFGTDFSLTINNIESEDAAYYFCLQHDNFPLTFGQGTKLEIKT |
| | | TTPAPRPPTPAPTIASQPLSLRPEACRPAAGGAVHTRGLDFACDIYIWAPLAG |
| | | TCGVLLLSLVITLYCKRGRKKLLYIFKQPFMRPVQTTQEEDGCSCRFPEEEEG |
| | | GCELRVKFSRSADAPAYKQGQNQLYNELNLGRREEYDVLDKRRGRDPEMGGKP |
| | | RRKNPQEGLYNELQKDKMAEAYSEIGMKGERRRGKGHDGLYQGLSTATKDTYD |
| | | ALHMQALPPR |
| 149362-nt | 1062 | ATGGCCCTCCCTGTCACCGCCCTGCTGCTTCCGCTGGCTCTTCTGCTCCACGC |
| Full CAR | | CGCTCGGCCCCAAGTGCAGCTTCAGGAAAGCGGACCGGGCCTGGTCAAGCCAT |
| | | CCGAAACTCTCTCCCTGACTTGCACTGTGTCTGGCGGTTCCATCTCATCGTCG |
| | | TACTACTACTGGGGCTGGATTAGGCAGCCGCCCGGAAAGGGACTGGAGTGGAT |
| | | CGGAAGCATCTACTATTCCGGCTCGGCGTACTACAACCCTAGCCTCAAGTCGA |
| | | GAGTGACCATCTCCGTGGATACCTCCAAGAACCAGTTTTCCCTGCGCCTGAGC |
| | | TCCGTGACCGCCGCTGACACCGCCGTGTACTACTGTGCTCGGCATTGGCAGGA |
| | | ATGGCCCGATGCCTTCGACATTTGGGGCCAGGGCACTATGGTCACTGTGTCAT |
| | | CCGGGGGTGGAGGCAGCGGGGGAGGAGGGTCCGGGGGGGGAGGTTCAGAGACA |
| | | ACCTTGACCCAGTCACCCGCATTCATGTCCGCCACTCCGGGAGACAAGGTCAT |
| | | CATCTCGTGCAAAGCGTCCCAGGATATCGACGATGCCATGAATTGGTACCAGC |
| | | AGAAGCCTGGCGAAGCGCCGCTGTTCATTATCCAATCCGCAACCTCGCCCGTG |
| | | CCTGGAATCCCACCGCGGTTCAGCGGCAGCGGTTTCGGAACCGACTTTTCCCT |
| | | GACCATTAACAACATTGAGTCCGAGGACGCCGCCTACTACTTCTGCCTGCAAC |
| | | ACGACAACTTCCCTCTCACGTTCGGCCAGGGAACCAAGCTGGAAATCAAGACC |
| | | ACTACCCCAGCACCGAGGCCACCCACCCCGGCTCCTACCATCGCCTCCCAGCC |
| | | TCTGTCCCTGCGTCCGGAGGCATGTAGACCCGCAGCTGGTGGGGCCGTGCATA |
| | | CCCGGGGTCTTGACTTCGCCTGCGATATCTACATTTGGGCCCCTCTGGCTGGT |
| | | ACTTGCGGGGTCCTGCTGCTTTCACTCGTGATCACTCTTTACTGTAAGCGCGG |
| | | TCGGAAGAAGCTGCTGTACATCTTTAAGCAACCCTTCATGAGGCCTGTGCAGA |
| | | CTACTCAAGAGGAGGACGGCTGTTCATGCCGGTTCCCAGAGGAGGAGGAAGGC |
| | | GGCTGCGAACTGCGCGTGAAATTCAGCCGCAGCGCAGATGCTCCAGCCTACAA |
| | | GCAGGGGCAGAACCAGCTCTACAACGAACTCAATCTTGGTCGGAGAGAGGAGT |
| | | ACGACGTGCTGGACAAGCGGAGAGGACGGGACCCAGAAATGGGCGGGAAGCCG |
| | | CGCAGAAAGAATCCCCAAGAGGGCCTGTACAACGAGCTCCAAAAGGATAAGAT |
| | | GGCAGAAGCCTATAGCGAGATTGGTATGAAAGGGGAACGCAGAAGAGGCAAAG |
| | | GCCACGACGGACTGTACCAGGGACTCAGCACCGCCACCAAGGACACCTATGAC |
| | | GCTCTTCACATGCAGGCCCTGCCGCCTCGG |

149363

| | | |
|---|---|---|
| 149363-aa | 1063 | VNLRESGPALVKPTQTLTLTCTFSGFSLRTSGMCVSWIRQPPGKALEWLARID |
| ScFv domain | | WDEDKFYSTSLKTRLTISKDTSDNQVVLRMTNMDPADTATYYCARSGAGGTSA |
| | | TAFDIWGPGTMVTVSSGGGGSGGGGSGGGGSDIQMTQSPSSLSASVGDRVTIT |
| | | CRASQDIYNNLAWFQLKPGSAPRSLMYAANKSQSGVPSRFSGSASGTDFTLTI |
| | | SSLQPEDFATYYCQHYYRFPYSFGQGTKLEIK |
| 149363-nt ScFv | 1064 | CAAGTCAATCTGCGCGAATCCGGCCCCGCCTTGGTCAAGCCTACCCAGACCCT |
| domain | | CACTCTGACCTGTACTTTCTCCGGCTTCTCCCTGCGGACTTCCGGGATGTGCG |
| | | TGTCCTGGATCAGACAGCCTCCGGGAAAGGCCCTGGAGTGGCTCGCTCGCATT |
| | | GACTGGGATGAGGACAAGTTCTACTCCACCTCACTCAAGACCAGGCTGACCAT |
| | | CAGCAAAGATACCTCTGACAACCAAGTGGTGCTCCGCATGACCAACATGGACC |
| | | CAGCCGACACTGCCACTTACTACTGCGCGAGGAGCGGAGCGGGCGGAACCTCC |
| | | GCCACCGCCTTCGATATTTGGGGCCCGGGTACCATGGTCACCGTGTCAAGCGG |
| | | AGGAGGGGGGTCCGGGGGCGGCGGTTCCGGGGGAGGCGGATCGGACATTCAGA |
| | | TGACTCAGTCACCATCGTCCCTGAGCGCTAGCGTGGGCGACAGAGTGACAATC |
| | | ACTTGCCGGGCATCCCAGGACATCTATAACAACCTTGCGTGGTTCCAGCTGAA |
| | | GCCTGGTTCCGCACCGCGGTCACTTATGTACGCCGCCAACAAGAGCCAGTCGG |
| | | GAGTGCCGTCCCGGTTTTCCGGTTCGGCCTCGGGAACTGACTTCACCCTGACG |
| | | ATCTCCAGCCTGCAACCCGAGGATTTCGCCACCTACTACTGCCAGCACTACTA |
| | | CCGCTTTCCCTACTCGTTCGGACAGGGAACCAAGCTGGAAATCAAG |
| 149363-aa VH | 1065 | QVNLRESGPALVKPTQTLTLTCTFSGFSLRTSGMCVSWIRQPPGKALEWLARI |
| | | DWDEDKFYSTSLKTRLTISKDTSDNQVVLRMTNMDPADTATYYCARSGAGGTS |
| | | ATAFDIWGPGTMVTVSS |
| 149363-aa VL | 1066 | DIQMTQSPSSLSASVGDRVTITCRASQDIYNNLAWFQLKPGSAPRSLMYAANK |
| | | SQSGVPSRFSGSASGTDFTLTISSLQPEDFATYYCQHYYRFPYSFGQGTKLEI |
| | | K |
| 149363-aa Full | 1067 | MALPVTALLLPLALLLHAARPQVNLRESGPALVKPTQTLTLTCTFSGFSLRTS |
| CAR | | GMCVSWIRQPPGKALEWLARIDWDEDKFYSTSLKTRLTISKDTSDNQVVLRMT |
| | | NMDPADTATYYCARSGAGGTSATAFDIWGPGTMVTVSSGGGGSGGGGSGGGGS |
| | | DIQMTQSPSSLSASVGDRVTITCRASQDIYNNLAWFQLKPGSAPRSLMYAANK |
| | | SQSGVPSRFSGSASGTDFTLTISSLQPEDFATYYCQHYYRFPYSFGQGTKLEI |
| | | KTTTPAPRPPTPAPTIASQPLSLRPEACRPAAGGAVHTRGLDFACDIYIWAPL |
| | | AGTCGVLLLSLVITLYCKRGRKKLLYIFKQPFMRPVQTTQEEDGCSCRFPEEE |
| | | EGGCELRVKFSRSADAPAYKQGQNQLYNELNLGRREEYDVLDKRRGRDPEMGG |
| | | KPRRKNPQEGLYNELQKDKMAEAYSEIGMKGERRRGKGHDGLYQGLSTATKDT |
| | | YDALHMQALPPR |
| 149363-nt | 1068 | ATGGCCCTCCCTGTCACCGCCCTGCTGCTTCCGCTGGCTCTTCTGCTCCACGC |
| Full CAR | | CGCTCGGCCCCAAGTCAATCTGCGCGAATCCGGCCCCGCCTTGGTCAAGCCTA |
| | | CCCAGACCCTCACTCTGACCTGTACTTTCTCCGGCTTCTCCCTGCGGACTTCC |
| | | GGGATGTGCGTGTCCTGGATCAGACAGCCTCCGGGAAAGGCCCTGGAGTGGCT |
| | | CGCTCGCATTGACTGGGATGAGGACAAGTTCTACTCCACCTCACTCAAGACCA |
| | | GGCTGACCATCAGCAAAGATACCTCTGACAACCAAGTGGTGCTCCGCATGACC |
| | | AACATGGACCCAGCCGACACTGCCACTTACTACTGCGCGAGGAGCGGAGCGGG |
| | | CGGAACCTCCGCCACCGCCTTCGATATTTGGGGCCCGGGTACCATGGTCACCG |
| | | TGTCAAGCGGAGGAGGGGGGTCCGGGGGCGGCGGTTCCGGGGGAGGCGGATCG |
| | | GACATTCAGATGACTCAGTCACCATCGTCCCTGAGCGCTAGCGTGGGCGACAG |
| | | AGTGACAATCACTTGCCGGGCATCCCAGGACATCTATAACAACCTTGCGTGGT |
| | | TCCAGCTGAAGCCTGGTTCCGCACCGCGGTCACTTATGTACGCCGCCAACAAG |
| | | AGCCAGTCGGGAGTGCCGTCCCGGTTTTCCGGTTCGGCCTCGGGAACTGACTT |
| | | CACCCTGACGATCTCCAGCCTGCAACCCGAGGATTTCGCCACCTACTACTGCC |
| | | AGCACTACTACCGCTTTCCCTACTCGTTCGGACAGGGAACCAAGCTGGAAATC |
| | | AAGACCACTACCCCAGCACCGAGGCCACCCACCCCGGCTCCTACCATCGCCTC |
| | | CCAGCCTCTGTCCCTGCGTCCGGAGGCATGTAGACCCGCAGCTGGTGGGGCCG |
| | | TGCATACCCGGGGTCTTGACTTCGCCTGCGATATCTACATTTGGGCCCCTCTG |
| | | GCTGGTACTTGCGGGGTCCTGCTGCTTTCACTCGTGATCACTCTTTACTGTAA |
| | | GCGCGGTCGGAAGAAGCTGCTGTACATCTTTAAGCAACCCTTCATGAGGCCTG |
| | | TGCAGACTACTCAAGAGGAGGACGGCTGTTCATGCCGGTTCCCAGAGGAGGAG |
| | | GAAGGCGGCTGCGAACTGCGCGTGAAATTCAGCCGCAGCGCAGATGCTCCAGC |
| | | CTACAAGCAGGGGCAGAACCAGCTCTACAACGAACTCAATCTTGGTCGGAGAG |
| | | AGGAGTACGACGTGCTGGACAAGCGGAGAGGACGGGACCCAGAAATGGGCGGG |
| | | AAGCCGCGCAGAAAGAATCCCCAAGAGGGCCTGTACAACGAGCTCCAAAAGGA |
| | | TAAGATGGCAGAAGCCTATAGCGAGATTGGTATGAAAGGGGAACGCAGAAGAG |
| | | GCAAAGGCCACGACGGACTGTACCAGGGACTCAGCACCGCCACCAAGGACACC |
| | | TATGACGCTCTTCACATGCAGGCCCTGCCGCCTCGG |

149364

| | | |
|---|---|---|
| 149364-aa | 1069 | EVQLVESGGGLVKPGGSLRLSCAASGFTFSSYSMNWVRQAPGKGLEWVSSISS |
| ScFv domain | | SSSYIYYADSVKGRFTISRDNAKNSLYLQMNSLRAEDTAVYYCAKTIAAVYAF |
| | | DIWGQGTTVTVSSGGGGSGGGGSGGGGSEIVLTQSPLSLPVTPEEPASISCRS |
| | | SQSLLHSNGYNYLDWYLQKPGQSPQLLIYLGSNRASGVPDRFSGSGSGTDFTL |
| | | KISRVEAEDVGVYYCMQALQTPYTFGQGTKLEIK |
| 149364-nt ScFv | 1070 | GAAGTGCAGCTTGTCGAATCCGGGGGGGGACTGGTCAAGCCGGGCGGATCACT |
| domain | | GAGACTGTCCTGCGCCGCGAGCGGCTTCACGTTCTCCTCCTACTCCATGAACT |
| | | GGGTCCGCCAAGCCCCCGGGAAGGGACTGGAATGGGTGTCCTCTATCTCCTCG |
| | | TCGTCGTCCTACATCTACTACGCCGACTCCGTGAAGGGAAGATTCACCATTTC |
| | | CCGCGACAACGCAAAGAACTCACTGTACTTGCAAATGAACTCACTCCGGGCCG |
| | | AAGATACTGCTGTGTACTATTGCGCCAAGACTATTGCCGCCGTCTACGCTTTC |
| | | GACATCTGGGGCCAGGGAACCACCGTGACTGTGTCGTCCGGTGGTGGTGGCTC |
| | | GGGCGGAGGAGGAAGCGGCGGCGGGGGGTCCGAGATTGTGCTGACCCAGTCGC |
| | | CACTGAGCCTCCCTGTGACCCCCGAGGAACCCGCCAGCATCAGCTGCCGGTCC |
| | | AGCCAGTCCCTGCTCCACTCCAACGGATACAATTACCTCGATTGGTACCTTCA |
| | | GAAGCCTGGACAAAGCCCGCAGCTGCTCATCTACTTGGGATCAAACCGCGCGT |
| | | CAGGAGTGCCTGACCGGTTCTCCGGCTCGGGCAGCGGTACCGATTTCACCCTG |
| | | AAAATCTCCAGGGTGGAGGCAGAGGACGTGGGAGTGTATTACTGTATGCAGGC |
| | | GCTGCAGACTCCGTACACATTTGGGCAGGGCACCAAGCTGGAGATCAAG |
| 149364-aa VH | 1071 | EVQLVESGGGLVKPGGSLRLSCAASGFTFSSYSMNWVRQAPGKGLEWVSSISS |
| | | SSSYIYYADSVKGRFTISRDNAKNSLYLQMNSLRAEDTAVYYCAKTIAAVYAF |
| | | DIWGQGTTVTVSS |
| 149364-aa VL | 1072 | EIVLTQSPLSLPVTPEEPASISCRSSQSLLHSNGYNYLDWYLQKPGQSPQLLI |
| | | YLGSNRASGVPDRFSGSGSGTDFTLKISRVEAEDVGVYYCMQALQTPYTFGQG |
| | | TKLEIK |
| 149364-aa Full | 1073 | MALPVTALLLPLALLLHAARPEVQLVESGGGLVKPGGSLRLSCAASGFTFSSY |
| CAR | | SMNWVRQAPGKGLEWVSSISSSSSYIYYADSVKGRFTISRDNAKNSLYLQMNS |
| | | LRAEDTAVYYCAKTIAAVYAFDIWGQGTTVTVSSGGGGSGGGGSGGGGSEIVL |
| | | TQSPLSLPVTPEEPASISCRSSQSLLHSNGYNYLDWYLQKPGQSPQLLIYLGS |
| | | NRASGVPDRFSGSGSGTDFTLKISRVEAEDVGVYYCMQALQTPYTFGQGTKLE |
| | | IKTTTPAPRPPTPAPTIASQPLSLRPEACRPAAGGAVHTRGLDFACDIYIWAP |
| | | LAGTCGVLLLSLVITLYCKRGRKKLLYIFKQPFMRPVQTTQEEDGCSCRFPEE |
| | | EEGGCELRVKFSRSADAPAYKQGQNQLYNELNLGRREEYDVLDKRRGRDPEMG |
| | | GKPRRKNPQEGLYNELQKDKMAEAYSEIGMKGERRRGKGHDGLYQGLSTATKD |
| | | TYDALHMQALPPR |
| 149364-nt | 1074 | ATGGCCCTCCCTGTCACCGCCCTGCTGCTTCCGCTGGCTCTTCTGCTCCACGC |
| Full CAR | | CGCTCGGCCCGAAGTGCAGCTTGTCGAATCCGGGGGGGGACTGGTCAAGCCGG |
| | | GCGGATCACTGAGACTGTCCTGCGCCGCGAGCGGCTTCACGTTCTCCTCCTAC |
| | | TCCATGAACTGGGTCCGCCAAGCCCCCGGGAAGGGACTGGAATGGGTGTCCTC |
| | | TATCTCCTCGTCGTCGTCCTACATCTACTACGCCGACTCCGTGAAGGGAAGAT |
| | | TCACCATTTCCCGCGACAACGCAAAGAACTCACTGTACTTGCAAATGAACTCA |
| | | CTCCGGGCCGAAGATACTGCTGTGTACTATTGCGCCAAGACTATTGCCGCCGT |
| | | CTACGCTTTCGACATCTGGGGCCAGGGAACCACCGTGACTGTGTCGTCCGGTG |
| | | GTGGTGGCTCGGGCGGAGGAGGAAGCGGCGGCGGGGGGTCCGAGATTGTGCTG |
| | | ACCCAGTCGCCACTGAGCCTCCCTGTGACCCCCGAGGAACCCGCCAGCATCAG |
| | | CTGCCGGTCCAGCCAGTCCCTGCTCCACTCCAACGGATACAATTACCTCGATT |
| | | GGTACCTTCAGAAGCCTGGACAAAGCCCGCAGCTGCTCATCTACTTGGGATCA |
| | | AACCGCGCGTCAGGAGTGCCTGACCGGTTCTCCGGCTCGGGCAGCGGTACCGA |
| | | TTTCACCCTGAAAATCTCCAGGGTGGAGGCAGAGGACGTGGGAGTGTATTACT |
| | | GTATGCAGGCGCTGCAGACTCCGTACACATTTGGGCAGGGCACCAAGCTGGAG |
| | | ATCAAGACCACTACCCCAGCACCGAGGCCACCCACCCCGGCTCCTACCATCGC |
| | | CTCCCAGCCTCTGTCCCTGCGTCCGGAGGCATGTAGACCCGCAGCTGGTGGGG |
| | | CCGTGCATACCCGGGGTCTTGACTTCGCCTGCGATATCTACATTTGGGCCCCT |
| | | CTGGCTGGTACTTGCGGGGTCCTGCTGCTTTCACTCGTGATCACTCTTTACTG |
| | | TAAGCGCGGTCGGAAGAAGCTGCTGTACATCTTTAAGCAACCCTTCATGAGGC |
| | | CTGTGCAGACTACTCAAGAGGAGGACGGCTGTTCATGCCGGTTCCCAGAGGAG |
| | | GAGGAAGGCGGCTGCGAACTGCGCGTGAAATTCAGCCGCAGCGCAGATGCTCC |
| | | AGCCTACAAGCAGGGGCAGAACCAGCTCTACAACGAACTCAATCTTGGTCGGA |
| | | GAGAGGAGTACGACGTGCTGGACAAGCGGAGAGGACGGGACCCAGAAATGGGC |
| | | GGGAAGCCGCGCAGAAAGAATCCCCAAGAGGGCCTGTACAACGAGCTCCAAAA |
| | | GGATAAGATGGCAGAAGCCTATAGCGAGATTGGTATGAAAGGGGAACGCAGAA |
| | | GAGGCAAAGGCCACGACGGACTGTACCAGGGACTCAGCACCGCCACCAAGGAC |
| | | ACCTATGACGCTCTTCACATGCAGGCCCTGCCGCCTCGG |

149365

| | | |
|---|---|---|
| 149365-aa | 1075 | EVQLVESGGGLVKPGGSLRLSCAASGFTFSDYYMSWIRQAPGKGLEWVSYISS |
| ScFv domain | | SGSTIYYADSVKGRFTISRDNAKNSLYLQMNSLRAEDTAVYYCARDLRGAFDI |
| | | WGQGTMVTVSSGGGGSGGGGSGGGGSSYVLTQSPSVSAAPGYTATISCGGNNI |
| | | GTKSVHWYQQKPGQAPLLVIRDDSVRPSKIPGRFSGSNSGNMATLTISGVQAG |
| | | DEADFYCQVWDSDSEHVVFGGGTKLTVL |
| 149365-nt ScFv | 1076 | GAAGTCCAGCTCGTGGAGTCCGGCGGAGGCCTTGTGAAGCCTGGAGGTTCGCT |
| domain | | GAGACTGTCCTGCGCCGCCTCCGGCTTCACCTTCTCCGACTACTACATGTCCT |
| | | GGATCAGACAGGCCCCGGGAAAGGGCCTGGAATGGGTGTCCTACATCTCGTCA |
| | | TCGGGCAGCACTATCTACTACGCGGACTCAGTGAAGGGGCGGTTCACCATTTC |
| | | CCGGGATAACGCGAAGAACTCGCTGTATCTGCAAATGAACTCACTGAGGGCCG |
| | | AGGACACCGCCGTGTACTACTGCGCCCGCGATCTCCGCGGGGCATTTGACATC |
| | | TGGGGACAGGGAACCATGGTCACAGTGTCCAGCGGAGGGGGAGGATCGGGTGG |
| | | CGGAGGTTCCGGGGGTGGAGGCTCCTCCTACGTGCTGACTCAGAGCCCAAGCG |
| | | TCAGCGCTGCGCCCGGTTACACGGCAACCATCTCCTGTGGCGGAAACAACATT |
| | | GGGACCAAGTCTGTGCACTGGTATCAGCAGAAGCCGGGCCAAGCTCCCCTGTT |
| | | GGTGATCCGCGATGACTCCGTGCGGCCTAGCAAAATTCCGGGACGGTTCTCCG |
| | | GCTCCAACAGCGGCAATATGGCCACTCTCACCATCTCGGGAGTGCAGGCCGGA |
| | | GATGAAGCCGACTTCTACTGCCAAGTCTGGGACTCAGACTCCGAGCATGTGGT |
| | | GTTCGGGGGCGGAACCAAGCTGACTGTGCTC |
| 149365-aa VH | 1077 | EVQLVESGGGLVKPGGSLRLSCAASGFTFSDYYMSWIRQAPGKGLEWVSYISS |
| | | SGSTIYYADSVKGRFTISRDNAKNSLYLQMNSLRAEDTAVYYCARDLRGAFDI |
| | | WGQGTMVTVSS |
| 149365-aa VL | 1078 | SYVLTQSPSVSAAPGYTATISCGGNNIGTKSVHWYQQKPGQAPLLVIRDDSVR |
| | | PSKIPGRFSGSNSGNMATLTISGVQAGDEADFYCQVWDSDSEHVVFGGGTKLT |
| | | VL |
| 149365-aa Full | 1079 | MALPVTALLLPLALLLHAARPEVQLVESGGGLVKPGGSLRLSCAASGFTFSDY |
| CAR | | YMSWIRQAPGKGLEWVSYISSSGSTIYYADSVKGRFTISRDNAKNSLYLQMNS |
| | | LRAEDTAVYYCARDLRGAFDIWGQGTMVTVSSGGGGSGGGGSGGGGSSYVLTQ |
| | | SPSVSAAPGYTATISCGGNNIGTKSVHWYQQKPGQAPLLVIRDDSVRPSKIPG |
| | | RFSGSNSGNMATLTISGVQAGDEADFYCQVWDSDSEHVVFGGGTKLTVLTTTP |
| | | APRPPTPAPTIASQPLSLRPEACRPAAGGAVHTRGLDFACDIYIWAPLAGTCG |
| | | VLLLSLVITLYCKRGRKKLLYIFKQPFMRPVQTTQEEDGCSCRFPEEEEGGCE |
| | | LRVKFSRSADAPAYKQGQNQLYNELNLGRREEYDVLDKRRGRDPEMGGKPRRK |
| | | NPQEGLYNELQKDKMAEAYSEIGMKGERRRGKGHDGLYQGLSTATKDTYDALH |
| | | MQALPPR |
| 149365-nt | 1080 | ATGGCCCTCCCTGTCACCGCCCTGCTGCTTCCGCTGGCTCTTCTGCTCCACGC |
| Full CAR | | CGCTCGGCCCGAAGTCCAGCTCGTGGAGTCCGGCGGAGGCCTTGTGAAGCCTG |
| | | GAGGTTCGCTGAGACTGTCCTGCGCCGCCTCCGGCTTCACCTTCTCCGACTAC |
| | | TACATGTCCTGGATCAGACAGGCCCCGGGAAAGGGCCTGGAATGGGTGTCCTA |
| | | CATCTCGTCATCGGGCAGCACTATCTACTACGCGGACTCAGTGAAGGGGCGGT |
| | | TCACCATTTCCCGGGATAACGCGAAGAACTCGCTGTATCTGCAAATGAACTCA |
| | | CTGAGGGCCGAGGACACCGCCGTGTACTACTGCGCCCGCGATCTCCGCGGGGC |
| | | ATTTGACATCTGGGGACAGGGAACCATGGTCACAGTGTCCAGCGGAGGGGGAG |
| | | GATCGGGTGGCGGAGGTTCCGGGGGTGGAGGCTCCTCCTACGTGCTGACTCAG |
| | | AGCCCAAGCGTCAGCGCTGCGCCCGGTTACACGGCAACCATCTCCTGTGGCGG |
| | | AAACAACATTGGGACCAAGTCTGTGCACTGGTATCAGCAGAAGCCGGGCCAAG |
| | | CTCCCCTGTTGGTGATCCGCGATGACTCCGTGCGGCCTAGCAAAATTCCGGGA |
| | | CGGTTCTCCGGCTCCAACAGCGGCAATATGGCCACTCTCACCATCTCGGGAGT |
| | | GCAGGCCGGAGATGAAGCCGACTTCTACTGCCAAGTCTGGGACTCAGACTCCG |
| | | AGCATGTGGTGTTCGGGGGCGGAACCAAGCTGACTGTGCTCACCACTACCCCA |
| | | GCACCGAGGCCACCCACCCCGGCTCCTACCATCGCCTCCCAGCCTCTGTCCCT |
| | | GCGTCCGGAGGCATGTAGACCCGCAGCTGGTGGGGCCGTGCATACCCGGGGTC |
| | | TTGACTTCGCCTGCGATATCTACATTTGGGCCCCTCTGGCTGGTACTTGCGGG |
| | | GTCCTGCTGCTTTCACTCGTGATCACTCTTTACTGTAAGCGCGGTCGGAAGAA |
| | | GCTGCTGTACATCTTTAAGCAACCCTTCATGAGGCCTGTGCAGACTACTCAAG |
| | | AGGAGGACGGCTGTTCATGCCGGTTCCCAGAGGAGGAGGAAGGCGGCTGCGAA |
| | | CTGCGCGTGAAATTCAGCCGCAGCGCAGATGCTCCAGCCTACAAGCAGGGGCA |
| | | GAACCAGCTCTACAACGAACTCAATCTTGGTCGGAGAGAGGAGTACGACGTGC |
| | | TGGACAAGCGGAGAGGACGGGACCCAGAAATGGGCGGGAAGCCGCGCAGAAAG |
| | | AATCCCCAAGAGGGCCTGTACAACGAGCTCCAAAAGGATAAGATGGCAGAAGC |
| | | CTATAGCGAGATTGGTATGAAAGGGGAACGCAGAAGAGGCAAAGGCCACGACG |
| | | GACTGTACCAGGGACTCAGCACCGCCACCAAGGACACCTATGACGCTCTTCAC |
| | | ATGCAGGCCCTGCCGCCTCGG |

149366

| | | |
|---|---|---|
| 149366-aa | 1081 | QVQLVQSGAEVKKPGASVKVSCKPSGYTVTSHYIHWVRRAPGQGLEWMGMINP |
| ScFv domain | | SGGVTAYSQTLQGRVTMTSDTSSSTVYMELSSLRSEDTAMYYCAREGSGSGWY |
| | | FDFWGRGTLVTVSSGGGGSGGGGSGGGGSSYVLTQPPSVSVSPGQTASITCSG |
| | | DGLSKKYVSWYQQKAGQSPVVLISRDKERPSGIPDRFSGSNSADTATLTISGT |
| | | QAMDEADYYCQAWDDTTVVFGGGTKLTVL |
| 149366-nt ScFv | 1082 | CAAGTGCAGCTGGTGCAGAGCGGGGCCGAAGTCAAGAAGCCGGGAGCCTCCGT |
| domain | | GAAAGTGTCCTGCAAGCCTTCGGGATACACCGTGACCTCCCACTACATTCATT |
| | | GGGTCCGCCGCGCCCCCGGCCAAGGACTCGAGTGGATGGGCATGATCAACCCT |
| | | AGCGGCGGAGTGACCGCGTACAGCCAGACGCTGCAGGGACGCGTGACTATGAC |
| | | CTCGGATACCTCCTCCTCCACCGTCTATATGGAACTGTCCAGCCTGCGGTCCG |
| | | AGGATACCGCCATGTACTACTGCGCCCGGGAAGGATCAGGCTCCGGGTGGTAT |
| | | TTCGACTTCTGGGGAAGAGGCACCCTCGTGACTGTGTCATCTGGGGGAGGGGG |
| | | TTCCGGTGGTGGCGGATCGGGAGGAGGCGGTTCATCCTACGTGCTGACCCAGC |
| | | CACCCTCCGTGTCCGTGAGCCCCGGCCAGACTGCATCGATTACATGTAGCGGC |
| | | GACGGCCTCTCCAAGAAATACGTGTCGTGGTACCAGCAGAAGGCCGGACAGAG |
| | | CCCGGTGGTGCTGATCTCAAGAGATAAGGAGCGGCCTAGCGGAATCCCGGACA |
| | | GGTTCTCGGGTTCCAACTCCGCGGACACTGCTACTCTGACCATCTCGGGGACC |
| | | CAGGCTATGGACGAAGCCGATTACTACTGCCAAGCCTGGGACGACACTACTGT |
| | | CGTGTTTGGAGGGGGCACCAAGTTGACCGTCCTT |
| 149366-aa VH | 1083 | QVQLVQSGAEVKKPGASVKVSCKPSGYTVTSHYIHWVRRAPGQGLEWMGMINP |
| | | SGGVTAYSQTLQGRVTMTSDTSSSTVYMELSSLRSEDTAMYYCAREGSGSGWY |
| | | FDFWGRGTLVTVSS |
| 149366-aa VL | 1084 | SYVLTQPPSVSVSPGQTASITCSGDGLSKKYVSWYQQKAGQSPVVLISRDKER |
| | | PSGIPDRFSGSNSADTATLTISGTQAMDEADYYCQAWDDTTVVFGGGTKLTVL |
| 149366-aa Full | 1085 | MALPVTALLLPLALLLHAARPQVQLVQSGAEVKKPGASVKVSCKPSGYTVTSH |
| CAR | | YIHWVRRAPGQGLEWMGMINPSGGVTAYSQTLQGRVTMTSDTSSSTVYMELSS |
| | | LRSEDTAMYYCAREGSGSGWYFDFWGRGTLVTVSSGGGGSGGGGSGGGGSSYV |
| | | LTQPPSVSVSPGQTASITCSGDGLSKKYVSWYQQKAGQSPVVLISRDKERPSG |
| | | IPDRFSGSNSADTATLTISGTQAMDEADYYCQAWDDTTVVFGGGTKLTVLTTT |
| | | PAPRPPTPAPTIASQPLSLRPEACRPAAGGAVHTRGLDFACDIYIWAPLAGTC |
| | | GVLLLSLVITLYCKRGRKKLLYIFKQPFMRPVQTTQEEDGCSCRFPEEEEGGC |
| | | ELRVKFSRSADAPAYKQGQNQLYNELNLGRREEYDVLDKRRGRDPEMGGKPRR |
| | | KNPQEGLYNELQKDKMAEAYSEIGMKGERRRGKGHDGLYQGLSTATKDTYDAL |
| | | HMQALPPR |
| 149366-nt | 1086 | ATGGCCCTCCCTGTCACCGCCCTGCTGCTTCCGCTGGCTCTTCTGCTCCACGC |
| Full CAR | | CGCTCGGCCCCAAGTGCAGCTGGTGCAGAGCGGGGCCGAAGTCAAGAAGCCGG |
| | | GAGCCTCCGTGAAAGTGTCCTGCAAGCCTTCGGGATACACCGTGACCTCCCAC |
| | | TACATTCATTGGGTCCGCCGCGCCCCCGGCCAAGGACTCGAGTGGATGGGCAT |
| | | GATCAACCCTAGCGGCGGAGTGACCGCGTACAGCCAGACGCTGCAGGGACGCG |
| | | TGACTATGACCTCGGATACCTCCTCCTCCACCGTCTATATGGAACTGTCCAGC |
| | | CTGCGGTCCGAGGATACCGCCATGTACTACTGCGCCCGGGAAGGATCAGGCTC |
| | | CGGGTGGTATTTCGACTTCTGGGGAAGAGGCACCCTCGTGACTGTGTCATCTG |
| | | GGGGAGGGGGTTCCGGTGGTGGCGGATCGGGAGGAGGCGGTTCATCCTACGTG |
| | | CTGACCCAGCCACCCTCCGTGTCCGTGAGCCCCGGCCAGACTGCATCGATTAC |
| | | ATGTAGCGGCGACGGCCTCTCCAAGAAATACGTGTCGTGGTACCAGCAGAAGG |
| | | CCGGACAGAGCCCGGTGGTGCTGATCTCAAGAGATAAGGAGCGGCCTAGCGGA |
| | | ATCCCGGACAGGTTCTCGGGTTCCAACTCCGCGGACACTGCTACTCTGACCAT |
| | | CTCGGGGACCCAGGCTATGGACGAAGCCGATTACTACTGCCAAGCCTGGGACG |
| | | ACACTACTGTCGTGTTTGGAGGGGGCACCAAGTTGACCGTCCTTACCACTACC |
| | | CCAGCACCGAGGCCACCCACCCCGGCTCCTACCATCGCCTCCCAGCCTCTGTC |
| | | CCTGCGTCCGGAGGCATGTAGACCCGCAGCTGGTGGGGCCGTGCATACCCGGG |
| | | GTCTTGACTTCGCCTGCGATATCTACATTTGGGCCCCTCTGGCTGGTACTTGC |
| | | GGGGTCCTGCTGCTTTCACTCGTGATCACTCTTTACTGTAAGCGCGGTCGGAA |
| | | GAAGCTGCTGTACATCTTTAAGCAACCCTTCATGAGGCCTGTGCAGACTACTC |
| | | AAGAGGAGGACGGCTGTTCATGCCGGTTCCCAGAGGAGGAGGAAGGCGGCTGC |
| | | GAACTGCGCGTGAAATTCAGCCGCAGCGCAGATGCTCCAGCCTACAAGCAGGG |
| | | GCAGAACCAGCTCTACAACGAACTCAATCTTGGTCGGAGAGAGGAGTACGACG |
| | | TGCTGGACAAGCGGAGAGGACGGGACCCAGAAATGGGCGGGAAGCCGCGCAGA |
| | | AAGAATCCCCAAGAGGGCCTGTACAACGAGCTCCAAAAGGATAAGATGGCAGA |
| | | AGCCTATAGCGAGATTGGTATGAAAGGGGAACGCAGAAGAGGCAAAGGCCACG |
| | | ACGGACTGTACCAGGGACTCAGCACCGCCACCAAGGACACCTATGACGCTCTT |
| | | CACATGCAGGCCCTGCCGCCTCGG |

149367

| | | |
|---|---|---|
| 149367-aa | 1087 | QVQLQESGPGLVKPSQTLSLTCTVSGGSISSGGYYWSWIRQHPGKGLEWIGYI |
| ScFv domain | | YYSGSTYYNPSLKSRVTISVDTSKNQFSLKLSSVTAADTAVYYCARAGIAARL |
| | | RGAFDIWGQGTMVTVSSGGGGSGGGGSGGGGSDIVMTQSPSSVSASVGDRVII |
| | | TCRASQGIRNWLAWYQQKPGKAPNLLIYAASNLQSGVPSRFSGSGSGADFTLT |
| | | ISSLQPEDVATYYCQKYNSAPFTFGPGTKVDIK |
| 149367-nt ScFv | 1088 | CAAGTGCAGCTTCAGGAGAGCGGCCCGGGACTCGTGAAGCCGTCCCAGACCCT |
| domain | | GTCCCTGACTTGCACCGTGTCGGGAGGAAGCATCTCGAGCGGAGGCTACTATT |
| | | GGTCGTGGATTCGGCAGCACCCTGGAAAGGGCCTGGAATGGATCGGCTACATC |
| | | TACTACTCCGGCTCGACCTACTACAACCCATCGCTGAAGTCCAGAGTGACAAT |
| | | CTCAGTGGACACGTCCAAGAATCAGTTCAGCCTGAAGCTCTCTTCCGTGACTG |
| | | CGGCCGACACCGCCGTGTACTACTGCGCACGCGCTGGAATTGCCGCCCGGCTG |
| | | AGGGGTGCCTTCGACATTTGGGGACAGGGCACCATGGTCACCGTGTCCTCCGG |
| | | CGGCGGAGGTTCCGGGGGTGGAGGCTCAGGAGGAGGGGGGTCCGACATCGTCA |
| | | TGACTCAGTCGCCCTCAAGCGTCAGCGCGTCCGTCGGGGACAGAGTGATCATC |
| | | ACCTGTCGGGCGTCCCAGGGAATTCGCAACTGGCTGGCCTGGTATCAGCAGAA |
| | | GCCCGGAAAGGCCCCCAACCTGTTGATCTACGCCGCCTCAAACCTCCAATCCG |
| | | GGGTGCCGAGCCGCTTCAGCGGCTCCGGTTCGGGTGCCGATTTCACTCTGACC |
| | | ATCTCCTCCCTGCAACCTGAAGATGTGGCTACCTACTACTGCCAAAAGTACAA |
| | | CTCCGCACCTTTTACTTTCGGACCGGGGACCAAAGTGGACATTAAG |
| 149367-aa VH | 1089 | QVQLQESGPGLVKPSQTLSLTCTVSGGSISSGGYYWSWIRQHPGKGLEWIGYI |
| | | YYSGSTYYNPSLKSRVTISVDTSKNQFSLKLSSVTAADTAVYYCARAGIAARL |
| | | RGAFDIWGQGTMVTVSS |
| 149367-aa VL | 1090 | DIVMTQSPSSVSASVGDRVIITCRASQGIRNWLAWYQQKPGKAPNLLIYAASN |
| | | LQSGVPSRFSGSGSGADFTLTISSLQPEDVATYYCQKYNSAPFTFGPGTKVDI |
| | | K |
| 149367-aa Full | 1091 | MALPVTALLLPLALLLHAARPQVQLQESGPGLVKPSQTLSLTCTVSGGSISSG |
| CAR | | GYYWSWIRQHPGKGLEWIGYIYYSGSTYYNPSLKSRVTISVDTSKNQFSLKLS |
| | | SVTAADTAVYYCARAGIAARLRGAFDIWGQGTMVTVSSGGGGSGGGGSGGGGS |
| | | DIVMTQSPSSVSASVGDRVIITCRASQGIRNWLAWYQQKPGKAPNLLIYAASN |
| | | LQSGVPSRFSGSGSGADFTLTISSLQPEDVATYYCQKYNSAPFTFGPGTKVDI |
| | | KTTTPAPRPPTPAPTIASQPLSLRPEACRPAAGGAVHTRGLDFACDIYIWAPL |
| | | AGTCGVLLLSLVITLYCKRGRKKLLYIFKQPFMRPVQTTQEEDGCSCRFPEEE |
| | | EGGCELRVKFSRSADAPAYKQGQNQLYNELNLGRREEYDVLDKRRGRDPEMGG |
| | | KPRRKNPQEGLYNELQKDKMAEAYSEIGMKGERRRGKGHDGLYQGLSTATKDT |
| | | YDALHMQALPPR |
| 149367-nt | 1092 | ATGGCCCTCCCTGTCACCGCCCTGCTGCTTCCGCTGGCTCTTCTGCTCCACGC |
| Full CAR | | CGCTCGGCCCCAAGTGCAGCTTCAGGAGAGCGGCCCGGGACTCGTGAAGCCGT |
| | | CCCAGACCCTGTCCCTGACTTGCACCGTGTCGGGAGGAAGCATCTCGAGCGGA |
| | | GGCTACTATTGGTCGTGGATTCGGCAGCACCCTGGAAAGGGCCTGGAATGGAT |
| | | CGGCTACATCTACTACTCCGGCTCGACCTACTACAACCCATCGCTGAAGTCCA |
| | | GAGTGACAATCTCAGTGGACACGTCCAAGAATCAGTTCAGCCTGAAGCTCTCT |
| | | TCCGTGACTGCGGCCGACACCGCCGTGTACTACTGCGCACGCGCTGGAATTGC |
| | | CGCCCGGCTGAGGGGTGCCTTCGACATTTGGGGACAGGGCACCATGGTCACCG |
| | | TGTCCTCCGGCGGCGGAGGTTCCGGGGGTGGAGGCTCAGGAGGAGGGGGGTCC |
| | | GACATCGTCATGACTCAGTCGCCCTCAAGCGTCAGCGCGTCCGTCGGGGACAG |
| | | AGTGATCATCACCTGTCGGGCGTCCCAGGGAATTCGCAACTGGCTGGCCTGGT |
| | | ATCAGCAGAAGCCCGGAAAGGCCCCCAACCTGTTGATCTACGCCGCCTCAAAC |
| | | CTCCAATCCGGGGTGCCGAGCCGCTTCAGCGGCTCCGGTTCGGGTGCCGATTT |
| | | CACTCTGACCATCTCCTCCCTGCAACCTGAAGATGTGGCTACCTACTACTGCC |
| | | AAAAGTACAACTCCGCACCTTTTACTTTCGGACCGGGGACCAAAGTGGACATT |
| | | AAGACCACTACCCCAGCACCGAGGCCACCCACCCCGGCTCCTACCATCGCCTC |
| | | CCAGCCTCTGTCCCTGCGTCCGGAGGCATGTAGACCCGCAGCTGGTGGGGCCG |
| | | TGCATACCCGGGGTCTTGACTTCGCCTGCGATATCTACATTTGGGCCCCTCTG |
| | | GCTGGTACTTGCGGGGTCCTGCTGCTTTCACTCGTGATCACTCTTTACTGTAA |
| | | GCGCGGTCGGAAGAAGCTGCTGTACATCTTTAAGCAACCCTTCATGAGGCCTG |
| | | TGCAGACTACTCAAGAGGAGGACGGCTGTTCATGCCGGTTCCCAGAGGAGGAG |
| | | GAAGGCGGCTGCGAACTGCGCGTGAAATTCAGCCGCAGCGCAGATGCTCCAGC |
| | | CTACAAGCAGGGGCAGAACCAGCTCTACAACGAACTCAATCTTGGTCGGAGAG |
| | | AGGAGTACGACGTGCTGGACAAGCGGAGAGGACGGGACCCAGAAATGGGCGGG |
| | | AAGCCGCGCAGAAAGAATCCCCAAGAGGGCCTGTACAACGAGCTCCAAAAGGA |
| | | TAAGATGGCAGAAGCCTATAGCGAGATTGGTATGAAAGGGGAACGCAGAAGAG |
| | | GCAAAGGCCACGACGGACTGTACCAGGGACTCAGCACCGCCACCAAGGACACC |
| | | TATGACGCTCTTCACATGCAGGCCCTGCCGCCTCGG |

149368

| | | |
|---|---|---|
| 149368-aa | 1093 | QVQLVQSGAEVKKPGSSVKVSCKASGGTFSSYAISWVRQAPGQGLEWMGGIIP |
| ScFv domain | | IFGTANYAQKFQGRVTITADESTSTAYMELSSLRSEDTAVYYCARRGGYQLLR |
| | | WDVGLLRSAFDIWGQGTMVTVSSGGGGSGGGGSGGGGSSYVLTQPPSVSVAPG |
| | | QTARITCGGNNIGSKSVHWYQQKPGQAPVLVLYGKNNRPSGVPDRFSGSRSGT |
| | | TASLTITGAQAEDEADYYCSSRDSSGDHLRVFGTGTKVTVL |
| 149368-nt ScFv | 1094 | CAAGTGCAGCTGGTCCAGTCGGGCGCCGAGGTCAAGAAGCCCGGGAGCTCTGT |
| domain | | GAAAGTGTCCTGCAAGGCCTCCGGGGGCACCTTTAGCTCCTACGCCATCTCCT |
| | | GGGTCCGCCAAGCACCGGGTCAAGGCCTGGAGTGGATGGGGGGAATTATCCCT |
| | | ATCTTCGGCACTGCCAACTACGCCCAGAAGTTCCAGGGACGCGTGACCATTAC |
| | | CGCGGACGAATCCACCTCCACCGCTTATATGGAGCTGTCCAGCTTGCGCTCGG |
| | | AAGATACCGCCGTGTACTACTGCGCCCGGAGGGGTGGATACCAGCTGCTGAGA |
| | | TGGGACGTGGGCCTCCTGCGGTCGGCGTTCGACATCTGGGGCCAGGGCACTAT |
| | | GGTCACTGTGTCCAGCGGAGGAGGCGGATCGGGAGGCGGCGGATCAGGGGGAG |
| | | GCGGTTCCAGCTACGTGCTTACTCAACCCCCTTCGGTGTCCGTGGCCCCGGGA |
| | | CAGACCGCCAGAATCACTTGCGGAGGAAACAACATTGGGTCCAAGAGCGTGCA |
| | | TTGGTACCAGCAGAAGCCAGGACAGGCCCCTGTGCTGGTGCTCTACGGGAAGA |
| | | ACAATCGGCCCAGCGGAGTGCCGGACAGGTTCTCGGGTTCACGCTCCGGTACA |
| | | ACCGCTTCACTGACTATCACCGGGGCCCAGGCAGAGGATGAAGCGGACTACTA |
| | | CTGTTCCTCCCGGGATTCATCCGGCGACCACCTCCGGGTGTTCGGAACCGGAA |
| | | CGAAGGTCACCGTGCTG |
| 149368-aa VH | 1095 | QVQLVQSGAEVKKPGSSVKVSCKASGGTFSSYAISWVRQAPGQGLEWMGGIIP |
| | | IFGTANYAQKFQGRVTITADESTSTAYMELSSLRSEDTAVYYCARRGGYQLLR |
| | | WDVGLLRSAFDIWGQGTMVTVSS |
| 149368-aa VL | 1096 | SYVLTQPPSVSVAPGQTARITCGGNNIGSKSVHWYQQKPGQAPVLVLYGKNNR |
| | | PSGVPDRFSGSRSGTTASLTITGAQAEDEADYYCSSRDSSGDHLRVFGTGTKV |
| | | TVL |
| 149368-aa Full | 1097 | MALPVTALLLPLALLLHAARPQVQLVQSGAEVKKPGSSVKVSCKASGGTFSSY |
| CAR | | AISWVRQAPGQGLEWMGGIIPIFGTANYAQKFQGRVTITADESTSTAYMELSS |
| | | LRSEDTAVYYCARRGGYQLLRWDVGLLRSAFDIWGQGTMVTVSSGGGGSGGGG |
| | | SGGGGSSYVLTQPPSVSVAPGQTARITCGGNNIGSKSVHWYQQKPGQAPVLVL |
| | | YGKNNRPSGVPDRFSGSRSGTTASLTITGAQAEDEADYYCSSRDSSGDHLRVF |
| | | GTGTKVTVLTTTPAPRPPTPAPTIASQPLSLRPEACRPAAGGAVHTRGLDFAC |
| | | DIYIWAPLAGTCGVLLLSLVITLYCKRGRKKLLYIFKQPFMRPVQTTQEEDGC |
| | | SCRFPEEEEGGCELRVKFSRSADAPAYKQGQNQLYNELNLGRREEYDVLDKRR |
| | | GRDPEMGGKPRRKNPQEGLYNELQKDKMAEAYSEIGMKGERRRGKGHDGLYQG |
| | | LSTATKDTYDALHMQALPPR |
| 149368-nt | 1098 | ATGGCCCTCCCTGTCACCGCCCTGCTGCTTCCGCTGGCTCTTCTGCTCCACGC |
| Full CAR | | CGCTCGGCCCCAAGTGCAGCTGGTCCAGTCGGGCGCCGAGGTCAAGAAGCCCG |
| | | GGAGCTCTGTGAAAGTGTCCTGCAAGGCCTCCGGGGGCACCTTTAGCTCCTAC |
| | | GCCATCTCCTGGGTCCGCCAAGCACCGGGTCAAGGCCTGGAGTGGATGGGGGG |
| | | AATTATCCCTATCTTCGGCACTGCCAACTACGCCCAGAAGTTCCAGGGACGCG |
| | | TGACCATTACCGCGGACGAATCCACCTCCACCGCTTATATGGAGCTGTCCAGC |
| | | TTGCGCTCGGAAGATACCGCCGTGTACTACTGCGCCCGGAGGGGTGGATACCA |
| | | GCTGCTGAGATGGGACGTGGGCCTCCTGCGGTCGGCGTTCGACATCTGGGGCC |
| | | AGGGCACTATGGTCACTGTGTCCAGCGGAGGAGGCGGATCGGGAGGCGGCGGA |
| | | TCAGGGGGAGGCGGTTCCAGCTACGTGCTTACTCAACCCCCTTCGGTGTCCGT |
| | | GGCCCCGGGACAGACCGCCAGAATCACTTGCGGAGGAAACAACATTGGGTCCA |
| | | AGAGCGTGCATTGGTACCAGCAGAAGCCAGGACAGGCCCCTGTGCTGGTGCTC |
| | | TACGGGAAGAACAATCGGCCCAGCGGAGTGCCGGACAGGTTCTCGGGTTCACG |
| | | CTCCGGTACAACCGCTTCACTGACTATCACCGGGGCCCAGGCAGAGGATGAAG |
| | | CGGACTACTACTGTTCCTCCCGGGATTCATCCGGCGACCACCTCCGGGTGTTC |
| | | GGAACCGGAACGAAGGTCACCGTGCTGACCACTACCCCAGCACCGAGGCCACC |
| | | CACCCCGGCTCCTACCATCGCCTCCCAGCCTCTGTCCCTGCGTCCGGAGGCAT |
| | | GTAGACCCGCAGCTGGTGGGGCCGTGCATACCCGGGGTCTTGACTTCGCCTGC |
| | | GATATCTACATTTGGGCCCCTCTGGCTGGTACTTGCGGGGTCCTGCTGCTTTC |
| | | ACTCGTGATCACTCTTTACTGTAAGCGCGGTCGGAAGAAGCTGCTGTACATCT |
| | | TTAAGCAACCCTTCATGAGGCCTGTGCAGACTACTCAAGAGGAGGACGGCTGT |
| | | TCATGCCGGTTCCCAGAGGAGGAGGAAGGCGGCTGCGAACTGCGCGTGAAATT |
| | | CAGCCGCAGCGCAGATGCTCCAGCCTACAAGCAGGGGCAGAACCAGCTCTACA |
| | | ACGAACTCAATCTTGGTCGGAGAGAGGAGTACGACGTGCTGGACAAGCGGAGA |
| | | GGACGGGACCCAGAAATGGGCGGGAAGCCGCGCAGAAAGAATCCCCAAGAGGG |
| | | CCTGTACAACGAGCTCCAAAAGGATAAGATGGCAGAAGCCTATAGCGAGATTG |
| | | GTATGAAAGGGGAACGCAGAAGAGGCAAAGGCCACGACGGACTGTACCAGGGA |
| | | CTCAGCACCGCCACCAAGGACACCTATGACGCTCTTCACATGCAGGCCCTGCC |
| | | GCCTCGG |

149369

| | | |
|---|---|---|
| 149369-aa | 1099 | EVQLQQSGPGLVKPSQTLSLTCAISGDSVSSNSAAWNWIRQSPSRGLEWLGRT |
| ScFv domain | | YYRSKWYSFYAISLKSRIIINPDTSKNQFSLQLKSVTPEDTAVYYCARSSPEG |
| | | LFLYWFDPWGQGTLVTVSSGGDGSGGGGSGGGGSSSELTQDPAVSVALGQTIR |
| | | ITCQGDSLGNYYATWYQQKPGQAPVLVIYGTNNRPSGIPDRFSASSSGNTASL |
| | | TITGAQAEDEADYYCNSRDSSGHHLLFGTGTKVTVL |
| 149369-nt ScFv | 1100 | GAAGTGCAGCTCCAACAGTCAGGACCGGGGCTCGTGAAGCCATCCCAGACCCT |
| domain | | GTCCCTGACTTGTGCCATCTCGGGAGATAGCGTGTCATCGAACTCCGCCGCCT |
| | | GGAACTGGATTCGGCAGAGCCCGTCCCGCGGACTGGAGTGGCTTGGAAGGACC |
| | | TACTACCGGTCCAAGTGGTACTCTTTCTACGCGATCTCGCTGAAGTCCCGCAT |
| | | TATCATTAACCCTGATACCTCCAAGAATCAGTTCTCCCTCCAACTGAAATCCG |
| | | TCACCCCCGAGGACACAGCAGTGTATTACTGCGCACGGAGCAGCCCCGAAGGA |
| | | CTGTTCCTGTATTGGTTTGACCCCTGGGGCCAGGGGACTCTTGTGACCGTGTC |
| | | GAGCGGCGGAGATGGGTCCGGTGGCGGTGGTTCGGGGGGCGGCGGATCATCAT |
| | | CCGAACTGACCCAGGACCCGGCTGTGTCCGTGGCGCTGGGACAAACCATCCGC |
| | | ATTACGTGCCAGGGAGACTCCCTGGGCAACTACTACGCCACTTGGTACCAGCA |
| | | GAAGCCGGGCCAAGCCCCTGTGTTGGTCATCTACGGGACCAACAACAGACCTT |
| | | CCGGCATCCCCGACCGGTTCAGCGCTTCGTCCTCCGGCAACACTGCCAGCCTG |
| | | ACCATCACTGGAGCGCAGGCCGAAGATGAGGCCGACTACTACTGCAACAGCAG |
| | | AGACTCCTCGGGTCATCACCTCTTGTTCGGAACTGGAACCAAGGTCACCGTGC |
| | | TG |
| 149369-aa VH | 1101 | EVQLQQSGPGLVKPSQTLSLTCAISGDSVSSNSAAWNWIRQSPSRGLEWLGRT |
| | | YYRSKWYSFYAISLKSRIIINPDTSKNQFSLQLKSVTPEDTAVYYCARSSPEG |
| | | LFLYWFDPWGQGTLVTVSS |
| 149369-aa VL | 1102 | SSELTQDPAVSVALGQTIRITCQGDSLGNYYATWYQQKPGQAPVLVIYGTNNR |
| | | PSGIPDRFSASSSGNTASLTITGAQAEDEADYYCNSRDSSGHHLLFGTGTKVT |
| | | VL |
| 149369-aa Full | 1103 | MALPVTALLLPLALLLHAARPEVQLQQSGPGLVKPSQTLSLTCAISGDSVSSN |
| CAR | | SAAWNWIRQSPSRGLEWLGRTYYRSKWYSFYAISLKSRIIINPDTSKNQFSLQ |
| | | LKSVTPEDTAVYYCARSSPEGLFLYWFDPWGQGTLVTVSSGGDGSGGGGSGGG |
| | | GSSSELTQDPAVSVALGQTIRITCQGDSLGNYYATWYQQKPGQAPVLVIYGTN |
| | | NRPSGIPDRFSASSSGNTASLTITGAQAEDEADYYCNSRDSSGHHLLFGTGTK |
| | | VTVLTTTPAPRPPTPAPTIASQPLSLRPEACRPAAGGAVHTRGLDFACDIYIW |
| | | APLAGTCGVLLLSLVITLYCKRGRKKLLYIFKQPFMRPVQTTQEEDGCSCRFP |
| | | EEEEGGCELRVKFSRSADAPAYKQGQNQLYNELNLGRREEYDVLDKRRGRDPE |
| | | MGGKPRRKNPQEGLYNELQKDKMAEAYSEIGMKGERRRGKGHDGLYQGLSTAT |
| | | KDTYDALHMQALPPR |
| 149369-nt | 1104 | ATGGCCCTCCCTGTCACCGCCCTGCTGCTTCCGCTGGCTCTTCTGCTCCACGC |
| Full CAR | | CGCTCGGCCCGAAGTGCAGCTCCAACAGTCAGGACCGGGGCTCGTGAAGCCAT |
| | | CCCAGACCCTGTCCCTGACTTGTGCCATCTCGGGAGATAGCGTGTCATCGAAC |
| | | TCCGCCGCCTGGAACTGGATTCGGCAGAGCCCGTCCCGCGGACTGGAGTGGCT |
| | | TGGAAGGACCTACTACCGGTCCAAGTGGTACTCTTTCTACGCGATCTCGCTGA |
| | | AGTCCCGCATTATCATTAACCCTGATACCTCCAAGAATCAGTTCTCCCTCCAA |
| | | CTGAAATCCGTCACCCCCGAGGACACAGCAGTGTATTACTGCGCACGGAGCAG |
| | | CCCCGAAGGACTGTTCCTGTATTGGTTTGACCCCTGGGGCCAGGGGACTCTTG |
| | | TGACCGTGTCGAGCGGCGGAGATGGGTCCGGTGGCGGTGGTTCGGGGGGCGGC |
| | | GGATCATCATCCGAACTGACCCAGGACCCGGCTGTGTCCGTGGCGCTGGGACA |
| | | AACCATCCGCATTACGTGCCAGGGAGACTCCCTGGGCAACTACTACGCCACTT |
| | | GGTACCAGCAGAAGCCGGGCCAAGCCCCTGTGTTGGTCATCTACGGGACCAAC |
| | | AACAGACCTTCCGGCATCCCCGACCGGTTCAGCGCTTCGTCCTCCGGCAACAC |
| | | TGCCAGCCTGACCATCACTGGAGCGCAGGCCGAAGATGAGGCCGACTACTACT |
| | | GCAACAGCAGAGACTCCTCGGGTCATCACCTCTTGTTCGGAACTGGAACCAAG |
| | | GTCACCGTGCTGACCACTACCCCAGCACCGAGGCCACCCACCCCGGCTCCTAC |
| | | CATCGCCTCCCAGCCTCTGTCCCTGCGTCCGGAGGCATGTAGACCCGCAGCTG |
| | | GTGGGGCCGTGCATACCCGGGGTCTTGACTTCGCCTGCGATATCTACATTTGG |
| | | GCCCCTCTGGCTGGTACTTGCGGGGTCCTGCTGCTTTCACTCGTGATCACTCT |
| | | TTACTGTAAGCGCGGTCGGAAGAAGCTGCTGTACATCTTTAAGCAACCCTTCA |
| | | TGAGGCCTGTGCAGACTACTCAAGAGGAGGACGGCTGTTCATGCCGGTTCCCA |
| | | GAGGAGGAGGAAGGCGGCTGCGAACTGCGCGTGAAATTCAGCCGCAGCGCAGA |
| | | TGCTCCAGCCTACAAGCAGGGGCAGAACCAGCTCTACAACGAACTCAATCTTG |
| | | GTCGGAGAGAGGAGTACGACGTGCTGGACAAGCGGAGAGGACGGGACCCAGAA |
| | | ATGGGCGGGAAGCCGCGCAGAAAGAATCCCCAAGAGGGCCTGTACAACGAGCT |
| | | CCAAAAGGATAAGATGGCAGAAGCCTATAGCGAGATTGGTATGAAAGGGGAAC |
| | | GCAGAAGAGGCAAAGGCCACGACGGACTGTACCAGGGACTCAGCACCGCCACC |
| | | AAGGACACCTATGACGCTCTTCACATGCAGGCCCTGCCGCCTCGG |

BCMA_EBB-C1978-A4

| | | |
|---|---|---|
| BCMA_EBB- | 1105 | EVQLVESGGGLVQPGGSLRLSCAASGFTFSSYAMSWVRQAPGKGLEWVSAISG |
| C1978-A4 - aa | | SGGSTYYADSVKGRFTISRDNSKNTLYLQMNSLRAEDTAVYYCAKVEGSGSLD |
| ScFv domain | | YWGQGTLVTVSSGGGGSGGGGSGGGGSEIVMTQSPGTLSLSPGERATLSCRAS |
| | | QSVSSAYLAWYQQKPGQPPRLLISGASTRATGIPDRFGGSGSGTDFTLTISRL |
| | | EPEDFAVYYCQHYGSSFNGSSLFTFGQGTRLEIK |
| BCMA_EBB- | 1106 | GAAGTGCAGCTCGTGGAGTCAGGAGGCGGCCTGGTCCAGCCGGGAGGGTCCCT |
| C1978-A4 - nt | | TAGACTGTCATGCGCCGCAAGCGGATTCACTTTCTCCTCCTATGCCATGAGCT |
| ScFv domain | | GGGTCCGCCAAGCCCCCGGAAAGGGACTGGAATGGGTGTCCGCCATCTCGGGG |
| | | TCTGGAGGCTCAACTTACTACGCTGACTCCGTGAAGGGACGGTTCACCATTAG |
| | | CCGCGACAACTCCAAGAACACCCTCTACCTCCAAATGAACTCCCTGCGGGCCG |
| | | AGGATACCGCCGTCTACTACTGCGCCAAAGTGGAAGGTTCAGGATCGCTGGAC |
| | | TACTGGGGACAGGGTACTCTCGTGACCGTGTCATCGGGCGGAGGAGGTTCCGG |
| | | CGGTGGCGGCTCCGGCGGCGGAGGGTCGGAGATCGTGATGACCCAGAGCCCTG |
| | | GTACTCTGAGCCTTTCGCCGGGAGAAAGGGCCACCCTGTCCTGCCGCGCTTCC |
| | | CAATCCGTGTCCTCCGCGTACTTGGCGTGGTACCAGCAGAAGCCGGGACAGCC |
| | | CCCTCGGCTGCTGATCAGCGGGGCCAGCACCCGGGCAACCGGAATCCCAGACA |
| | | GATTCGGGGGTTCCGGCAGCGGCACAGATTTCACCCTGACTATTTCGAGGTTG |
| | | GAGCCCGAGGACTTTGCGGTGTATTACTGTCAGCACTACGGGTCGTCCTTTAA |
| | | TGGCTCCAGCCTGTTCACGTTCGGACAGGGGACCCGCCTGGAAATCAAG |
| BCMA_EBB- | 1107 | EVQLVESGGGLVQPGGSLRLSCAASGFTFSSYAMSWVRQAPGKGLEWVSAISG |
| C1978-A4 - aa | | SGGSTYYADSVKGRFTISRDNSKNTLYLQMNSLRAEDTAVYYCAKVEGSGSLD |
| VH | | YWGQGTLVTVSS |
| BCMA_EBB- | 1108 | EIVMTQSPGTLSLSPGERATLSCRASQSVSSAYLAWYQQKPGQPPRLLISGAS |
| C1978-A4 - aa | | TRATGIPDRFGGSGSGTDFTLTISRLEPEDFAVYYCQHYGSSFNGSSLFTFGQ |
| VL | | GTRLEIK |
| BCMA_EBB- | 1109 | MALPVTALLLPLALLLHAARPEVQLVESGGGLVQPGGSLRLSCAASGFTFSSY |
| C1978-A4 - aa | | AMSWVRQAPGKGLEWVSAISGSGGSTYYADSVKGRFTISRDNSKNTLYLQMNS |
| Full CART | | LRAEDTAVYYCAKVEGSGSLDYWGQGTLVTVSSGGGGSGGGGSGGGGSEIVMT |
| | | QSPGTLSLSPGERATLSCRASQSVSSAYLAWYQQKPGQPPRLLISGASTRATG |
| | | IPDRFGGSGSGTDFTLTISRLEPEDFAVYYCQHYGSSFNGSSLFTFGQGTRLE |
| | | IKTTTPAPRPPTPAPTIASQPLSLRPEACRPAAGGAVHTRGLDFACDIYIWAP |
| | | LAGTCGVLLLSLVITLYCKRGRKKLLYIFKQPFMRPVQTTQEEDGCSCRFPEE |
| | | EEGGCELRVKFSRSADAPAYKQGQNQLYNELNLGRREEYDVLDKRRGRDPEMG |
| | | GKPRRKNPQEGLYNELQKDKMAEAYSEIGMKGERRRGKGHDGLYQGLSTATKD |
| | | TYDALHMQALPPR |
| BCMA_EBB- | 1110 | ATGGCCCTCCCTGTCACCGCCCTGCTGCTTCCGCTGGCTCTTCTGCTCCACGC |
| C1978-A4 - nt | | CGCTCGGCCCGAAGTGCAGCTCGTGGAGTCAGGAGGCGGCCTGGTCCAGCCGG |
| Full CART | | GAGGGTCCCTTAGACTGTCATGCGCCGCAAGCGGATTCACTTTCTCCTCCTAT |
| | | GCCATGAGCTGGGTCCGCCAAGCCCCCGGAAAGGGACTGGAATGGGTGTCCGC |
| | | CATCTCGGGGTCTGGAGGCTCAACTTACTACGCTGACTCCGTGAAGGGACGGT |
| | | TCACCATTAGCCGCGACAACTCCAAGAACACCCTCTACCTCCAAATGAACTCC |
| | | CTGCGGGCCGAGGATACCGCCGTCTACTACTGCGCCAAAGTGGAAGGTTCAGG |
| | | ATCGCTGGACTACTGGGGACAGGGTACTCTCGTGACCGTGTCATCGGGCGGAG |
| | | GAGGTTCCGGCGGTGGCGGCTCCGGCGGCGGAGGGTCGGAGATCGTGATGACC |
| | | CAGAGCCCTGGTACTCTGAGCCTTTCGCCGGGAGAAAGGGCCACCCTGTCCTG |
| | | CCGCGCTTCCCAATCCGTGTCCTCCGCGTACTTGGCGTGGTACCAGCAGAAGC |
| | | CGGGACAGCCCCCTCGGCTGCTGATCAGCGGGGCCAGCACCCGGGCAACCGGA |
| | | ATCCCAGACAGATTCGGGGGTTCCGGCAGCGGCACAGATTTCACCCTGACTAT |
| | | TTCGAGGTTGGAGCCCGAGGACTTTGCGGTGTATTACTGTCAGCACTACGGGT |
| | | CGTCCTTTAATGGCTCCAGCCTGTTCACGTTCGGACAGGGGACCCGCCTGGAA |
| | | ATCAAGACCACTACCCCAGCACCGAGGCCACCCACCCCGGCTCCTACCATCGC |
| | | CTCCCAGCCTCTGTCCCTGCGTCCGGAGGCATGTAGACCCGCAGCTGGTGGGG |
| | | CCGTGCATACCCGGGGTCTTGACTTCGCCTGCGATATCTACATTTGGGCCCCT |
| | | CTGGCTGGTACTTGCGGGGTCCTGCTGCTTTCACTCGTGATCACTCTTTACTG |
| | | TAAGCGCGGTCGGAAGAAGCTGCTGTACATCTTTAAGCAACCCTTCATGAGGC |
| | | CTGTGCAGACTACTCAAGAGGAGGACGGCTGTTCATGCCGGTTCCCAGAGGAG |
| | | GAGGAAGGCGGCTGCGAACTGCGCGTGAAATTCAGCCGCAGCGCAGATGCTCC |
| | | AGCCTACAAGCAGGGGCAGAACCAGCTCTACAACGAACTCAATCTTGGTCGGA |
| | | GAGAGGAGTACGACGTGCTGGACAAGCGGAGAGGACGGGACCCAGAAATGGGC |
| | | GGGAAGCCGCGCAGAAAGAATCCCCAAGAGGGCCTGTACAACGAGCTCCAAAA |
| | | GGATAAGATGGCAGAAGCCTATAGCGAGATTGGTATGAAAGGGGAACGCAGAA |
| | | GAGGCAAAGGCCACGACGGACTGTACCAGGGACTCAGCACCGCCACCAAGGAC |
| | | ACCTATGACGCTCTTCACATGCAGGCCCTGCCGCCTCGG |

BCMA_EBB-C1978-G1

| | | |
|---|---|---|
| BCMA_EBB- | 1111 | EVQLVETGGGLVQPGGSLRLSCAASGITFSRYPMSWVRQAPGKGLEWV |
| C1978-G1 - aa | | SGISDSGVSTYYADSAKGRFTISRDNSKNTLFLQMSSLRDEDTAVYYCV |
| ScFv domain | | TRAGSEASDIWGQGTMVTVSSGGGGSGGGGSGGGGSEIVLTQSPATLSL |
| | | SPGERATLSCRASQSVSNSLAWYQQKPGQAPRLLIYDASSRATGIPDRFS |
| | | GSGSGTDFTLTISRLEPEDFAIYYCQQFGTSSGLTFGGGTKLEIK |
| BCMA_EBB- | 1112 | GAAGTGCAACTGGTGGAAACCGGTGGCGGCCTGGTGCAGCCTGGAGGATCATT |
| C1978-G1 - nt | | GAGGCTGTCATGCGCGGCCAGCGGTATTACCTTCTCCCGGTACCCCATGTCCT |
| ScFv domain | | GGGTCAGACAGGCCCCGGGGAAAGGGCTTGAATGGGTGTCCGGGATCTCGGAC |
| | | TCCGGTGTCAGCACTTACTACGCCGACTCCGCCAAGGGACGCTTCACCATTTC |
| | | CCGGGACAACTCGAAGAACACCCTGTTCCTCCAAATGAGCTCCCTCCGGGACG |
| | | AGGATACTGCAGTGTACTACTGCGTGACCCGCGCCGGGTCCGAGGCGTCTGAC |
| | | ATTTGGGGACAGGGCACTATGGTCACCGTGTCGTCCGGCGGAGGGGGCTCGGG |
| | | AGGCGGTGGCAGCGGAGGAGGAGGGTCCGAGATCGTGCTGACCCAATCCCCGG |
| | | CCACCCTCTCGCTGAGCCCTGGAGAAAGGGCAACCTTGTCCTGTCGCGCGAGC |
| | | CAGTCCGTGAGCAACTCCCTGGCCTGGTACCAGCAGAAGCCCGGACAGGCTCC |
| | | GAGACTTCTGATCTACGACGCTTCGAGCCGGGCCACTGGAATCCCCGACCGCT |
| | | TTTCGGGGTCCGGCTCAGGAACCGATTTCACCCTGACAATCTCACGGCTGGAG |
| | | CCAGAGGATTTCGCCATCTATTACTGCCAGCAGTTCGGTACTTCCTCCGGCCT |
| | | GACTTTCGGAGGCGGCACGAAGCTCGAAATCAAG |
| BCMA_EBB- | 1113 | EVQLVETGGGLVQPGGSLRLSCAASGITFSRYPMSWVRQAPGKGLEWVSGISD |
| C1978-G1 - aa | | SGVSTYYADSAKGRFTISRDNSKNTLFLQMSSLRDEDTAVYYCVTRAGSEASD |
| VH | | IWGQGTMVTVSS |
| BCMA_EBB- | 1114 | EIVLTQSPATLSLSPGERATLSCRASQSVSNSLAWYQQKPGQAPRLLIYDASS |
| C1978-G1 - aa | | RATGIPDRFSGSGSGTDFTLTISRLEPEDFAIYYCQQFGTSSGLTFGGGTKLE |
| VL | | IK |
| BCMA_EBB- | 1115 | MALPVTALLLPLALLLHAARPEVQLVETGGGLVQPGGSLRLSCAASGIT |
| C1978-G1 - aa | | FSRYPMSWVRQAPGKGLEWVSGISDSGVSTYYADSAKGRFTISRDNSK |
| Full CART | | NTLFLQMSSLRDEDTAVYYCVTRAGSEASDIVVGQGTMVTVSSGGGGS |
| | | GGGGSGGGGSEIVLTQSPATLSLSPGERATLSCRASQSVSNSLAWYQQK |
| | | PGQAPRLLIYDASSRATGIPDRFSGSGSGTDFTLTISRLEPEDFAIYYCQQ |
| | | FGTSSGLTFGGGTKLEIKTTTPAPRPPTPAPTIASQPLSLRPEACRPAAGG |
| | | AVHTRGLDFACDIYIWAPLAGTCGVLLLSLVITLYCKRGRKKLLYIFKQ |
| | | PFMRPVQTTQEEDGCSCRFPEEEEGGCELRVKFSRSADAPAYKQGQNQ |
| | | LYNELNLGRREEYDVLDKRRGRDPEMGGKPRRKNPQEGLYNELQKDK |
| | | [sequence omitted] |
| BCMA_EBB- | 1116 | ATGGCCCTCCCTGTCACCGCCCTGCTGCTTCCGCTGGCTCTTCTGCTCCACGC |
| C1978-G1 - nt | | CGCTCGGCCCGAAGTGCAACTGGTGGAAACCGGTGGCGGCCTGGTGCAGCCTG |
| Full CART | | GAGGATCATTGAGGCTGTCATGCGCGGCCAGCGGTATTACCTTCTCCCGGTAC |
| | | CCCATGTCCTGGGTCAGACAGGCCCCGGGGAAAGGGCTTGAATGGGTGTCCGG |
| | | GATCTCGGACTCCGGTGTCAGCACTTACTACGCCGACTCCGCCAAGGGACGCT |
| | | TCACCATTTCCCGGGACAACTCGAAGAACACCCTGTTCCTCCAAATGAGCTCC |
| | | CTCCGGGACGAGGATACTGCAGTGTACTACTGCGTGACCCGCGCCGGGTCCGA |
| | | GGCGTCTGACATTTGGGGACAGGGCACTATGGTCACCGTGTCGTCCGGCGGAG |
| | | GGGGCTCGGGAGGCGGTGGCAGCGGAGGAGGAGGGTCCGAGATCGTGCTGACC |
| | | CAATCCCCGGCCACCCTCTCGCTGAGCCCTGGAGAAAGGGCAACCTTGTCCTG |
| | | TCGCGCGAGCCAGTCCGTGAGCAACTCCCTGGCCTGGTACCAGCAGAAGCCCG |
| | | GACAGGCTCCGAGACTTCTGATCTACGACGCTTCGAGCCGGGCCACTGGAATC |
| | | CCCGACCGCTTTTCGGGGTCCGGCTCAGGAACCGATTTCACCCTGACAATCTC |
| | | ACGGCTGGAGCCAGAGGATTTCGCCATCTATTACTGCCAGCAGTTCGGTACTT |
| | | CCTCCGGCCTGACTTTCGGAGGCGGCACGAAGCTCGAAATCAAGACCACTACC |
| | | CCAGCACCGAGGCCACCCACCCCGGCTCCTACCATCGCCTCCCAGCCTCTGTC |
| | | CCTGCGTCCGGAGGCATGTAGACCCGCAGCTGGTGGGGCCGTGCATACCCGGG |
| | | GTCTTGACTTCGCCTGCGATATCTACATTTGGGCCCCTCTGGCTGGTACTTGC |
| | | GGGGTCCTGCTGCTTTCACTCGTGATCACTCTTTACTGTAAGCGCGGTCGGAA |
| | | GAAGCTGCTGTACATCTTTAAGCAACCCTTCATGAGGCCTGTGCAGACTACTC |
| | | AAGAGGAGGACGGCTGTTCATGCCGGTTCCCAGAGGAGGAGGAAGGCGGCTGC |
| | | GAACTGCGCGTGAAATTCAGCCGCAGCGCAGATGCTCCAGCCTACAAGCAGGG |
| | | GCAGAACCAGCTCTACAACGAACTCAATCTTGGTCGGAGAGAGGAGTACGACG |
| | | TGCTGGACAAGCGGAGAGGACGGGACCCAGAAATGGGCGGGAAGCCGCGCAGA |
| | | AAGAATCCCCAAGAGGGCCTGTACAACGAGCTCCAAAAGGATAAGATGGCAGA |
| | | AGCCTATAGCGAGATTGGTATGAAAGGGGAACGCAGAAGAGGCAAAGGCCACG |
| | | ACGGACTGTACCAGGGACTCAGCACCGCCACCAAGGACACCTATGACGCTCTT |
| | | CACATGCAGGCCCTGCCGCCTCGG |

BCMA_EBB-C1979-C1

| | | |
|---|---|---|
| BCMA_EBB- | 1117 | QVQLVESGGGLVQPGGSLRLSCAASGFTFSSYAMSWVRQAPGKGLEWVSAISG |
| C1979-C1 - aa | | SGGSTYYADSVKGRFTISRDNAKNSLYLQMNSLRAEDTAIYYCARATYKRELR |
| ScFv domain | | YYYGMDVWGQGTMVTVSSGGGGSGGGGSGGGGSEIVMTQSPGTVSLSPGERAT |
| | | LSCRASQSVSSSFLAWYQQKPGQAPRLLIYGASSRATGIPDRFSGSGSGTDFT |
| | | LTISRLEPEDSAVYYCQQYHSSPSWTFGQGTRLEIK |
| BCMA_EBB- | 1118 | CAAGTGCAGCTCGTGGAATCGGGTGGCGGACTGGTGCAGCCGGGGGGCTCACT |
| C1979-C1 - nt | | TAGACTGTCCTGCGCGGCCAGCGGATTCACTTTCTCCTCCTACGCCATGTCCT |
| ScFv domain | | GGGTCAGACAGGCCCCTGGAAAGGGCCTGGAATGGGTGTCCGCAATCAGCGGC |
| | | AGCGGCGGCTCGACCTATTACGCGGATTCAGTGAAGGGCAGATTCACCATTTC |
| | | CCGGGACAACGCCAAGAACTCCTTGTACCTTCAAATGAACTCCCTCCGCGCGG |
| | | AAGATACCGCAATCTACTACTGCGCTCGGGCCACTTACAAGAGGGAACTGCGC |
| | | TACTACTACGGGATGGACGTCTGGGGCCAGGGAACCATGGTCACCGTGTCCAG |
| | | CGGAGGAGGAGGATCGGGAGGAGGCGGTAGCGGGGGTGGAGGGTCGGAGATCG |
| | | TGATGACCCAGTCCCCCGGCACTGTGTCGCTGTCCCCCGGCGAACGGGCCACC |
| | | CTGTCATGTCGGGCCAGCCAGTCAGTGTCGTCAAGCTTCCTCGCCTGGTACCA |
| | | GCAGAAACCGGGACAAGCTCCCCGCCTGCTGATCTACGGAGCCAGCAGCCGGG |
| | | CCACCGGTATTCCTGACCGGTTCTCCGGTTCGGGGTCCGGGACCGACTTTACT |
| | | CTGACTATCTCTCGCCTCGAGCCAGAGGACTCCGCCGTGTATTACTGCCAGCA |
| | | GTACCACTCCTCCCCGTCCTGGACGTTCGGACAGGGCACAAGGCTGGAGATTA |
| | | AG |
| BCMA_EBB- | 1119 | QVQLVESGGGLVQPGGSLRLSCAASGFTFSSYAMSWVRQAPGKGLEWVSAISG |
| C1979-C1 - aa | | SGGSTYYADSVKGRFTISRDNAKNSLYLQMNSLRAEDTAIYYCARATYKRELR |
| VH | | YYYGMDVWGQGTMVTVSS |
| BCMA_EBB- | 1120 | EIVMTQSPGTVSLSPGERATLSCRASQSVSSSFLAWYQQKPGQAPRLLIYGAS |
| C1979-C1 - aa | | SRATGIPDRFSGSGSGTDFTLTISRLEPEDSAVYYCQQYHSSPSWTFGQGTRL |
| VL | | EIK |
| BCMA_EBB- | 1121 | MALPVTALLLPLALLLHAARPQVQLVESGGGLVQPGGSLRLSCAASGFTFSSY |
| C1979-C1 - aa | | AMSWVRQAPGKGLEWVSAISGSGGSTYYADSVKGRFTISRDNAKNSLYLQMNS |
| Full CART | | LRAEDTAIYYCARATYKRELRYYYGMDVWGQGTMVTVSSGGGGSGGGGSGGGG |
| | | SEIVMTQSPGTVSLSPGERATLSCRASQSVSSSFLAWYQQKPGQAPRLLIYGA |
| | | SSRATGIPDRFSGSGSGTDFTLTISRLEPEDSAVYYCQQYHSSPSWTFGQGTR |
| | | LEIKTTTPAPRPPTPAPTIASQPLSLRPEACRPAAGGAVHTRGLDFACDIYIW |
| | | APLAGTCGVLLLSLVITLYCKRGRKKLLYIFKQPFMRPVQTTQEEDGCSCRFP |
| | | EEEEGGCELRVKFSRSADAPAYKQGQNQLYNELNLGRREEYDVLDKRRGRDPE |
| | | MGGKPRRKNPQEGLYNELQKDKMAEAYSEIGMKGERRRGKGHDGLYQGLSTAT |
| | | KDTYDALHMQALPPR |
| BCMA_EBB- | 1122 | ATGGCCCTCCCTGTCACCGCCCTGCTGCTTCCGCTGGCTCTTCTGCTCCACGC |
| C1979-C1 - nt | | CGCTCGGCCCCAAGTGCAGCTCGTGGAATCGGGTGGCGGACTGGTGCAGCCGG |
| Full CART | | GGGGCTCACTTAGACTGTCCTGCGCGGCCAGCGGATTCACTTTCTCCTCCTAC |
| | | GCCATGTCCTGGGTCAGACAGGCCCCTGGAAAGGGCCTGGAATGGGTGTCCGC |
| | | AATCAGCGGCAGCGGCGGCTCGACCTATTACGCGGATTCAGTGAAGGGCAGAT |
| | | TCACCATTTCCCGGGACAACGCCAAGAACTCCTTGTACCTTCAAATGAACTCC |
| | | CTCCGCGCGGAAGATACCGCAATCTACTACTGCGCTCGGGCCACTTACAAGAG |
| | | GGAACTGCGCTACTACTACGGGATGGACGTCTGGGGCCAGGGAACCATGGTCA |
| | | CCGTGTCCAGCGGAGGAGGAGGATCGGGAGGAGGCGGTAGCGGGGGTGGAGGG |
| | | TCGGAGATCGTGATGACCCAGTCCCCCGGCACTGTGTCGCTGTCCCCCGGCGA |
| | | ACGGGCCACCCTGTCATGTCGGGCCAGCCAGTCAGTGTCGTCAAGCTTCCTCG |
| | | CCTGGTACCAGCAGAAACCGGGACAAGCTCCCCGCCTGCTGATCTACGGAGCC |
| | | AGCAGCCGGGCCACCGGTATTCCTGACCGGTTCTCCGGTTCGGGGTCCGGGAC |
| | | CGACTTTACTCTGACTATCTCTCGCCTCGAGCCAGAGGACTCCGCCGTGTATT |
| | | ACTGCCAGCAGTACCACTCCTCCCCGTCCTGGACGTTCGGACAGGGCACAAGG |
| | | CTGGAGATTAAGACCACTACCCCAGCACCGAGGCCACCCACCCCGGCTCCTAC |
| | | CATCGCCTCCCAGCCTCTGTCCCTGCGTCCGGAGGCATGTAGACCCGCAGCTG |
| | | GTGGGGCCGTGCATACCCGGGGTCTTGACTTCGCCTGCGATATCTACATTTGG |
| | | GCCCCTCTGGCTGGTACTTGCGGGGTCCTGCTGCTTTCACTCGTGATCACTCT |
| | | TTACTGTAAGCGCGGTCGGAAGAAGCTGCTGTACATCTTTAAGCAACCCTTCA |
| | | TGAGGCCTGTGCAGACTACTCAAGAGGAGGACGGCTGTTCATGCCGGTTCCCA |
| | | GAGGAGGAGGAAGGCGGCTGCGAACTGCGCGTGAAATTCAGCCGCAGCGCAGA |
| | | TGCTCCAGCCTACAAGCAGGGGCAGAACCAGCTCTACAACGAACTCAATCTTG |
| | | GTCGGAGAGAGGAGTACGACGTGCTGGACAAGCGGAGAGGACGGGACCCAGAA |
| | | ATGGGCGGGAAGCCGCGCAGAAAGAATCCCCAAGAGGGCCTGTACAACGAGCT |
| | | CCAAAAGGATAAGATGGCAGAAGCCTATAGCGAGATTGGTATGAAAGGGGAAC |
| | | GCAGAAGAGGCAAAGGCCACGACGGACTGTACCAGGGACTCAGCACCGCCACC |
| | | AAGGACACCTATGACGCTCTTCACATGCAGGCCCTGCCGCCTCGG |

BCMA_EBB-C1978-C7

| | | |
|---|---|---|
| BCMA_EBB- | 1123 | EVQLVETGGGLVQPGGSLRLSCAASGFTFSSYAMSWVRQAPGKGLEWVSAISG |
| C1978-C7 - aa | | SGGSTYYADSVKGRFTISRDNSKNTLYLQMNTLKAEDTAVYYCARATYKRELR |
| ScFv domain | | YYYGMDVWGQGTTVTVSSGGGGSGGGGSGGGGSEIVLTQSPSTLSLSPGESAT |
| | | LSCRASQSVSTTFLAWYQQKPGQAPRLLIYGSSNRATGIPDRFSGSGSGTDFT |
| | | LTIRRLEPEDFAVYYCQQYHSSPSWTFGQGTKVEIK |
| BCMA_EBB- | 1124 | GAGGTGCAGCTTGTGGAAACCGGTGGCGGACTGGTGCAGCCCGGAGGAAGCCT |
| C1978-C7 - nt | | CAGGCTGTCCTGCGCCGCGTCCGGCTTCACCTTCTCCTCGTACGCCATGTCCT |
| ScFv domain | | GGGTCCGCCAGGCCCCCGGAAAGGGCCTGGAATGGGTGTCCGCCATCTCTGGA |
| | | AGCGGAGGTTCCACGTACTACGCGGACAGCGTCAAGGGAAGGTTCACAATCTC |
| | | CCGCGATAATTCGAAGAACACTCTGTACCTTCAAATGAACACCCTGAAGGCCG |
| | | AGGACACTGCTGTGTACTACTGCGCACGGGCCACCTACAAGAGAGAGCTCCGG |
| | | TACTACTACGGAATGGACGTCTGGGGCCAGGGAACTACTGTGACCGTGTCCTC |
| | | GGGAGGGGGTGGCTCCGGGGGGGGCGGCTCCGGCGGAGGCGGTTCCGAGATTG |
| | | TGCTGACCCAGTCACCTTCAACTCTGTCGCTGTCCCCGGGAGAGAGCGCTACT |
| | | CTGAGCTGCCGGGCCAGCCAGTCCGTGTCCACCACCTTCCTCGCCTGGTATCA |
| | | GCAGAAGCCGGGGCAGGCACCACGGCTCTTGATCTACGGGTCAAGCAACAGAG |
| | | CGACCGGAATTCCTGACCGCTTCTCGGGGAGCGGTTCAGGCACCGACTTCACC |
| | | CTGACTATCCGGCGCCTGGAACCCGAAGATTTCGCCGTGTATTACTGTCAACA |
| | | GTACCACTCCTCGCCGTCCTGGACCTTTGGCCAAGGAACCAAAGTGGAAATCA |
| | | AG |
| BCMA_EBB- | 1125 | EVQLVETGGGLVQPGGSLRLSCAASGFTFSSYAMSWVRQAPGKGLEWVSAISG |
| C1978-C7 - aa | | SGGSTYYADSVKGRFTISRDNSKNTLYLQMNTLKAEDTAVYYCARATYKRELR |
| VH | | YYYGMDVWGQGTTVTVSS |
| BCMA_EBB- | 1126 | EIVLTQSPSTLSLSPGESATLSCRASQSVSTTFLAWYQQKPGQAPRLLIYGSS |
| C1978-C7 - aa | | NRATGIPDRFSGSGSGTDFTLTIRRLEPEDFAVYYCQQYHSSPSWTFGQGTKV |
| VL | | EIK |
| BCMA_EBB- | 1127 | MALPVTALLLPLALLLHAARPEVQLVETGGGLVQPGGSLRLSCAASGFTFSSY |
| C1978-C7 - aa | | AMSWVRQAPGKGLEWVSAISGSGGSTYYADSVKGRFTISRDNSKNTLYLQMNT |
| Full CART | | LKAEDTAVYYCARATYKRELRYYYGMDVWGQGTTVTVSSGGGGSGGGGSGGGG |
| | | SEIVLTQSPSTLSLSPGESATLSCRASQSVSTTFLAWYQQKPGQAPRLLIYGS |
| | | SNRATGIPDRFSGSGSGTDFTLTIRRLEPEDFAVYYCQQYHSSPSWTFGQGTK |
| | | VEIKTTTPAPRPPTPAPTIASQPLSLRPEACRPAAGGAVHTRGLDFACDIYIW |
| | | APLAGTCGVLLLSLVITLYCKRGRKKLLYIFKQPFMRPVQTTQEEDGCSCRFP |
| | | EEEEGGCELRVKFSRSADAPAYKQGQNQLYNELNLGRREEYDVLDKRRGRDPE |
| | | MGGKPRRKNPQEGLYNELQKDKMAEAYSEIGMKGERRRGKGHDGLYQGLSTAT |
| | | KDTYDALHMQALPPR |
| BCMA_EBB- | 1128 | ATGGCCCTCCCTGTCACCGCCCTGCTGCTTCCGCTGGCTCTTCTGCTCCACGC |
| C1978-C7 - nt | | CGCTCGGCCCGAGGTGCAGCTTGTGGAAACCGGTGGCGGACTGGTGCAGCCCG |
| Full CART | | GAGGAAGCCTCAGGCTGTCCTGCGCCGCGTCCGGCTTCACCTTCTCCTCGTAC |
| | | GCCATGTCCTGGGTCCGCCAGGCCCCCGGAAAGGGCCTGGAATGGGTGTCCGC |
| | | CATCTCTGGAAGCGGAGGTTCCACGTACTACGCGGACAGCGTCAAGGGAAGGT |
| | | TCACAATCTCCCGCGATAATTCGAAGAACACTCTGTACCTTCAAATGAACACC |
| | | CTGAAGGCCGAGGACACTGCTGTGTACTACTGCGCACGGGCCACCTACAAGAG |
| | | AGAGCTCCGGTACTACTACGGAATGGACGTCTGGGGCCAGGGAACTACTGTGA |
| | | CCGTGTCCTCGGGAGGGGGTGGCTCCGGGGGGGGCGGCTCCGGCGGAGGCGGT |
| | | TCCGAGATTGTGCTGACCCAGTCACCTTCAACTCTGTCGCTGTCCCCGGGAGA |
| | | GAGCGCTACTCTGAGCTGCCGGGCCAGCCAGTCCGTGTCCACCACCTTCCTCG |
| | | CCTGGTATCAGCAGAAGCCGGGGCAGGCACCACGGCTCTTGATCTACGGGTCA |
| | | AGCAACAGAGCGACCGGAATTCCTGACCGCTTCTCGGGGAGCGGTTCAGGCAC |
| | | CGACTTCACCCTGACTATCCGGCGCCTGGAACCCGAAGATTTCGCCGTGTATT |
| | | ACTGTCAACAGTACCACTCCTCGCCGTCCTGGACCTTTGGCCAAGGAACCAAA |
| | | GTGGAAATCAAGACCACTACCCCAGCACCGAGGCCACCCACCCCGGCTCCTAC |
| | | CATCGCCTCCCAGCCTCTGTCCCTGCGTCCGGAGGCATGTAGACCCGCAGCTG |
| | | GTGGGGCCGTGCATACCCGGGGTCTTGACTTCGCCTGCGATATCTACATTTGG |
| | | GCCCCTCTGGCTGGTACTTGCGGGGTCCTGCTGCTTTCACTCGTGATCACTCT |
| | | TTACTGTAAGCGCGGTCGGAAGAAGCTGCTGTACATCTTTAAGCAACCCTTCA |
| | | TGAGGCCTGTGCAGACTACTCAAGAGGAGGACGGCTGTTCATGCCGGTTCCCA |
| | | GAGGAGGAGGAAGGCGGCTGCGAACTGCGCGTGAAATTCAGCCGCAGCGCAGA |
| | | TGCTCCAGCCTACAAGCAGGGGCAGAACCAGCTCTACAACGAACTCAATCTTG |
| | | GTCGGAGAGAGGAGTACGACGTGCTGGACAAGCGGAGAGGACGGGACCCAGAA |
| | | ATGGGCGGGAAGCCGCGCAGAAAGAATCCCCAAGAGGGCCTGTACAACGAGCT |
| | | CCAAAAGGATAAGATGGCAGAAGCCTATAGCGAGATTGGTATGAAAGGGGAAC |
| | | GCAGAAGAGGCAAAGGCCACGACGGACTGTACCAGGGACTCAGCACCGCCACC |
| | | AAGGACACCTATGACGCTCTTCACATGCAGGCCCTGCCGCCTCGG |

BCMA_EBB-C1978-D10

| | | |
|---|---|---|
| BCMA_EBB- | 1129 | EVQLVETGGGLVQPGRSLRLSCAASGFTFDDYAMHWVRQAPGKGLEWVSGISW |
| C1978-D10 - aa | | NSGSIGYADSVKGRFTISRDNAKNSLYLQMNSLRDEDTAVYYCARVGKAVPDV |
| ScFv domain | | WGQGTTVTVSSGGGGSGGGGSGGGGSDIVMTQTPSSLSASVGDRVTITCRASQ |
| | | SISSYLNWYQQKPGKAPKLLIYAASSLQSGVPSRFSGSGSGTDFTLTISSLQP |
| | | EDFATYYCQQSYSTPYSFGQGTRLEIK |
| BCMA_EBB- | 1130 | GAAGTGCAGCTCGTGGAAACTGGAGGTGGACTCGTGCAGCCTGGACGGTCGCT |
| C1978-D10- nt | | GCGGCTGAGCTGCGCTGCATCCGGCTTCACCTTCGACGATTATGCCATGCACT |
| ScFv domain | | GGGTCAGACAGGCGCCAGGGAAGGGACTTGAGTGGGTGTCCGGTATCAGCTGG |
| | | AATAGCGGCTCAATCGGATACGCGGACTCCGTGAAGGGAAGGTTCACCATTTC |
| | | CCGCGACAACGCCAAGAACTCCCTGTACTTGCAAATGAACAGCCTCCGGGATG |
| | | AGGACACTGCCGTGTACTACTGCGCCCGCGTCGGAAAAGCTGTGCCCGACGTC |
| | | TGGGGCCAGGGAACCACTGTGACCGTGTCCAGCGGCGGGGGTGGATCGGGCGG |
| | | TGGAGGGTCCGGTGGAGGGGGCTCAGATATTGTGATGACCCAGACCCCCTCGT |
| | | CCCTGTCCGCCTCGGTCGGCGACCGCGTGACTATCACATGTAGAGCCTCGCAG |
| | | AGCATCTCCAGCTACCTGAACTGGTATCAGCAGAAGCCGGGGAAGGCCCCGAA |
| | | GCTCCTGATCTACGCGGCATCATCACTGCAATCGGGAGTGCCGAGCCGGTTTT |
| | | CCGGGTCCGGCTCCGGCACCGACTTCACGCTGACCATTTCTTCCCTGCAACCC |
| | | GAGGACTTCGCCACTTACTACTGCCAGCAGTCCTACTCCACCCCTTACTCCTT |
| | | CGGCCAAGGAACCAGGCTGGAAATCAAG |
| BCMA_EBB- | 1131 | EVQLVETGGGLVQPGRSLRLSCAASGFTFDDYAMHWVRQAPGKGLEWVSGISW |
| C1978-D10 - aa | | NSGSIGYADSVKGRFTISRDNAKNSLYLQMNSLRDEDTAVYYCARVGKAVPDV |
| VH | | WGQGTTVTVSS |
| BCMA_EBB- | 1132 | DIVMTQTPSSLSASVGDRVTITCRASQSISSYLNWYQQKPGKAPKLLIYAASS |
| C1978-D10- aa | | LQSGVPSRFSGSGSGTDFTLTISSLQPEDFATYYCQQSYSTPYSFGQGTRLEI |
| VL | | K |
| BCMA_EBB- | 1133 | MALPVTALLLPLALLLHAARPEVQLVETGGGLVQPGRSLRLSCAASGFTFDDY |
| C1978-D10 - aa | | AMHWVRQAPGKGLEWVSGISWNSGSIGYADSVKGRFTISRDNAKNSLYLQMNS |
| Full CART | | LRDEDTAVYYCARVGKAVPDVWGQGTTVTVSSGGGGSGGGGSGGGGSDIVMTQ |
| | | TPSSLSASVGDRVTITCRASQSISSYLNWYQQKPGKAPKLLIYAASSLQSGVP |
| | | SRFSGSGSGTDFTLTISSLQPEDFATYYCQQSYSTPYSFGQGTRLEIKTTTPA |
| | | PRPPTPAPTIASQPLSLRPEACRPAAGGAVHTRGLDFACDIYIWAPLAGTCGV |
| | | LLLSLVITLYCKRGRKKLLYIFKQPFMRPVQTTQEEDGCSCRFPEEEEGGCEL |
| | | RVKFSRSADAPAYKQGQNQLYNELNLGRREEYDVLDKRRGRDPEMGGKPRRKN |
| | | PQEGLYNELQKDKMAEAYSEIGMKGERRRGKGHDGLYQGLSTATKDTYDALHM |
| | | QALPPR |
| BCMA_EBB- | 1134 | ATGGCCCTCCCTGTCACCGCCCTGCTGCTTCCGCTGGCTCTTCTGCTCCACGC |
| C1978-D10 - nt | | CGCTCGGCCCGAAGTGCAGCTCGTGGAAACTGGAGGTGGACTCGTGCAGCCTG |
| Full CART | | GACGGTCGCTGCGGCTGAGCTGCGCTGCATCCGGCTTCACCTTCGACGATTAT |
| | | GCCATGCACTGGGTCAGACAGGCGCCAGGGAAGGGACTTGAGTGGGTGTCCGG |
| | | TATCAGCTGGAATAGCGGCTCAATCGGATACGCGGACTCCGTGAAGGGAAGGT |
| | | TCACCATTTCCCGCGACAACGCCAAGAACTCCCTGTACTTGCAAATGAACAGC |
| | | CTCCGGGATGAGGACACTGCCGTGTACTACTGCGCCCGCGTCGGAAAAGCTGT |
| | | GCCCGACGTCTGGGGCCAGGGAACCACTGTGACCGTGTCCAGCGGCGGGGGTG |
| | | GATCGGGCGGTGGAGGGTCCGGTGGAGGGGGCTCAGATATTGTGATGACCCAG |
| | | ACCCCCTCGTCCCTGTCCGCCTCGGTCGGCGACCGCGTGACTATCACATGTAG |
| | | AGCCTCGCAGAGCATCTCCAGCTACCTGAACTGGTATCAGCAGAAGCCGGGGA |
| | | AGGCCCCGAAGCTCCTGATCTACGCGGCATCATCACTGCAATCGGGAGTGCCG |
| | | AGCCGGTTTTCCGGGTCCGGCTCCGGCACCGACTTCACGCTGACCATTTCTTC |
| | | CCTGCAACCCGAGGACTTCGCCACTTACTACTGCCAGCAGTCCTACTCCACCC |
| | | CTTACTCCTTCGGCCAAGGAACCAGGCTGGAAATCAAGACCACTACCCCAGCA |
| | | CCGAGGCCACCCACCCCGGCTCCTACCATCGCCTCCCAGCCTCTGTCCCTGCG |
| | | TCCGGAGGCATGTAGACCCGCAGCTGGTGGGGCCGTGCATACCCGGGGTCTTG |
| | | ACTTCGCCTGCGATATCTACATTTGGGCCCCTCTGGCTGGTACTTGCGGGGTC |
| | | CTGCTGCTTTCACTCGTGATCACTCTTTACTGTAAGCGCGGTCGGAAGAAGCT |
| | | GCTGTACATCTTTAAGCAACCCTTCATGAGGCCTGTGCAGACTACTCAAGAGG |
| | | AGGACGGCTGTTCATGCCGGTTCCCAGAGGAGGAGGAAGGCGGCTGCGAACTG |
| | | CGCGTGAAATTCAGCCGCAGCGCAGATGCTCCAGCCTACAAGCAGGGGCAGAA |
| | | CCAGCTCTACAACGAACTCAATCTTGGTCGGAGAGAGGAGTACGACGTGCTGG |
| | | ACAAGCGGAGAGGACGGGACCCAGAAATGGGCGGGAAGCCGCGCAGAAAGAAT |
| | | CCCCAAGAGGGCCTGTACAACGAGCTCCAAAAGGATAAGATGGCAGAAGCCTA |
| | | TAGCGAGATTGGTATGAAAGGGGAACGCAGAAGAGGCAAAGGCCACGACGGAC |
| | | TGTACCAGGGACTCAGCACCGCCACCAAGGACACCTATGACGCTCTTCACATG |
| | | CAGGCCCTGCCGCCTCGG |

BCMA_EBB-C1979-C12

| | | |
|---|---|---|
| BCMA_EBB- | 1135 | EVQLVESGGGLVQPGRSLRLSCTASGFTFDDYAMHWVRQRPGKGLEWVASINW |
| C1979-C12- aa | | KGNSLAYGDSVKGRFAISRDNAKNTVFLQMNSLRTEDTAVYYCASHQGVAYYN |
| ScFv domain | | YAMDVWGRGTLVTVSSGGGGSGGGGSGGGGSEIVLTQSPGTLSLSPGERATLS |
| | | CRATQSIGSSFLAWYQQRPGQAPRLLIYGASQRATGIPDRFSGRGSGTDFTLT |
| | | ISRVEPEDSAVYYCQHYESSPSWTFGQGTKVEIK |
| BCMA_EBB- | 1136 | GAAGTGCAGCTCGTGGAGAGCGGGGGAGGATTGGTGCAGCCCGGAAGGTCCCT |
| C1979-C12 - nt | | GCGGCTCTCCTGCACTGCGTCTGGCTTCACCTTCGACGACTACGCGATGCACT |
| ScFv domain | | GGGTCAGACAGCGCCCGGGAAAGGGCCTGGAATGGGTCGCCTCAATCAACTGG |
| | | AAGGGAAACTCCCTGGCCTATGGCGACAGCGTGAAGGGCCGCTTCGCCATTTC |
| | | GCGCGACAACGCCAAGAACACCGTGTTTCTGCAAATGAATTCCCTGCGGACCG |
| | | AGGATACCGCTGTGTACTACTGCGCCAGCCACCAGGGCGTGGCATACTATAAC |
| | | TACGCCATGGACGTGTGGGGAAGAGGGACGCTCGTCACCGTGTCCTCCGGGGG |
| | | CGGTGGATCGGGTGGAGGAGGAAGCGGTGGCGGGGGCAGCGAAATCGTGCTGA |
| | | CTCAGAGCCCGGGAACTCTTTCACTGTCCCCGGGAGAACGGGCCACTCTCTCG |
| | | TGCCGGGCCACCCAGTCCATCGGCTCCTCCTTCCTTGCCTGGTACCAGCAGAG |
| | | GCCAGGACAGGCGCCCCGCCTGCTGATCTACGGTGCTTCCCAACGCGCCACTG |
| | | GCATTCCTGACCGGTTCAGCGGCAGAGGGTCGGGAACCGATTTCACACTGACC |
| | | ATTTCCCGGGTGGAGCCCGAAGATTCGGCAGTCTACTACTGTCAGCATTACGA |
| | | GTCCTCCCCTTCATGGACCTTCGGTCAAGGGACCAAAGTGGAGATCAAG |
| BCMA_EBB- | 1137 | EVQLVESGGGLVQPGRSLRLSCTASGFTFDDYAMHWVRQRPGKGLEWVASINW |
| C1979-C12 - aa | | KGNSLAYGDSVKGRFAISRDNAKNTVFLQMNSLRTEDTAVYYCASHQGVAYYN |
| VH | | YAMDVWGRGTLVTVSS |
| BCMA_EBB- | 1138 | EIVLTQSPGTLSLSPGERATLSCRATQSIGSSFLAWYQQRPGQAPRLLIYGAS |
| C1979-C12 - aa | | QRATGIPDRFSGRGSGTDFTLTISRVEPEDSAVYYCQHYESSPSWTFGQGTKV |
| VL | | EIK |
| BCMA_EBB- | 1139 | MALPVTALLLPLALLLHAARPEVQLVESGGGLVQPGRSLRLSCTASGFTFDDY |
| C1979-C12 - aa | | AMHWVRQRPGKGLEWVASINWKGNSLAYGDSVKGRFAISRDNAKNTVFLQMNS |
| Full CART | | LRTEDTAVYYCASHQGVAYYNYAMDVWGRGTLVTVSSGGGGSGGGGSGGGGSE |
| | | IVLTQSPGTLSLSPGERATLSCRATQSIGSSFLAWYQQRPGQAPRLLIYGASQ |
| | | RATGIPDRFSGRGSGTDFTLTISRVEPEDSAVYYCQHYESSPSWTFGQGTKVE |
| | | IKTTTPAPRPPTPAPTIASQPLSLRPEACRPAAGGAVHTRGLDFACDIYIWAP |
| | | LAGTCGVLLLSLVITLYCKRGRKKLLYIFKQPFMRPVQTTQEEDGCSCRFPEE |
| | | EEGGCELRVKFSRSADAPAYKQGQNQLYNELNLGRREEYDVLDKRRGRDPEMG |
| | | GKPRRKNPQEGLYNELQKDKMAEAYSEIGMKGERRRGKGHDGLYQGLSTATKD |
| | | TYDALHMQALPPR |
| BCMA_EBB- | 1140 | ATGGCCCTCCCTGTCACCGCCCTGCTGCTTCCGCTGGCTCTTCTGCTCCACGC |
| C1979-C12 - nt | | CGCTCGGCCCGAAGTGCAGCTCGTGGAGAGCGGGGGAGGATTGGTGCAGCCCG |
| Full CART | | GAAGGTCCCTGCGGCTCTCCTGCACTGCGTCTGGCTTCACCTTCGACGACTAC |
| | | GCGATGCACTGGGTCAGACAGCGCCCGGGAAAGGGCCTGGAATGGGTCGCCTC |
| | | AATCAACTGGAAGGGAAACTCCCTGGCCTATGGCGACAGCGTGAAGGGCCGCT |
| | | TCGCCATTTCGCGCGACAACGCCAAGAACACCGTGTTTCTGCAAATGAATTCC |
| | | CTGCGGACCGAGGATACCGCTGTGTACTACTGCGCCAGCCACCAGGGCGTGGC |
| | | ATACTATAACTACGCCATGGACGTGTGGGGAAGAGGGACGCTCGTCACCGTGT |
| | | CCTCCGGGGGCGGTGGATCGGGTGGAGGAGGAAGCGGTGGCGGGGGCAGCGAA |
| | | ATCGTGCTGACTCAGAGCCCGGGAACTCTTTCACTGTCCCCGGGAGAACGGGC |
| | | CACTCTCTCGTGCCGGGCCACCCAGTCCATCGGCTCCTCCTTCCTTGCCTGGT |
| | | ACCAGCAGAGGCCAGGACAGGCGCCCCGCCTGCTGATCTACGGTGCTTCCCAA |
| | | CGCGCCACTGGCATTCCTGACCGGTTCAGCGGCAGAGGGTCGGGAACCGATTT |
| | | CACACTGACCATTTCCCGGGTGGAGCCCGAAGATTCGGCAGTCTACTACTGTC |
| | | AGCATTACGAGTCCTCCCCTTCATGGACCTTCGGTCAAGGGACCAAAGTGGAG |
| | | ATCAAGACCACTACCCCAGCACCGAGGCCACCCACCCCGGCTCCTACCATCGC |
| | | CTCCCAGCCTCTGTCCCTGCGTCCGGAGGCATGTAGACCCGCAGCTGGTGGGG |
| | | CCGTGCATACCCGGGGTCTTGACTTCGCCTGCGATATCTACATTTGGGCCCCT |
| | | CTGGCTGGTACTTGCGGGGTCCTGCTGCTTTCACTCGTGATCACTCTTTACTG |
| | | TAAGCGCGGTCGGAAGAAGCTGCTGTACATCTTTAAGCAACCCTTCATGAGGC |
| | | CTGTGCAGACTACTCAAGAGGAGGACGGCTGTTCATGCCGGTTCCCAGAGGAG |
| | | GAGGAAGGCGGCTGCGAACTGCGCGTGAAATTCAGCCGCAGCGCAGATGCTCC |
| | | AGCCTACAAGCAGGGGCAGAACCAGCTCTACAACGAACTCAATCTTGGTCGGA |
| | | GAGAGGAGTACGACGTGCTGGACAAGCGGAGAGGACGGGACCCAGAAATGGGC |
| | | GGGAAGCCGCGCAGAAAGAATCCCCAAGAGGGCCTGTACAACGAGCTCCAAAA |
| | | GGATAAGATGGCAGAAGCCTATAGCGAGATTGGTATGAAAGGGGAACGCAGAA |
| | | GAGGCAAAGGCCACGACGGACTGTACCAGGGACTCAGCACCGCCACCAAGGAC |
| | | ACCTATGACGCTCTTCACATGCAGGCCCTGCCGCCTCGG |

BCMA_EBB-C1980-G4

| | | |
|---|---|---|
| BCMA_EBB- | 1141 | EVQLVESGGGLVQPGGSLRLSCAASGFTFSSYAMSWVRQAPGKGLEWVSAISG |
| C1980-G4- aa | | SGGSTYYADSVKGRFTISRDNSKNTLYLQMNSLRAEDTAVYYCAKVVRDGMDV |
| ScFv domain | | WGQGTTVTVSSGGGGSGGGGSGGGGSEIVLTQSPATLSLSPGERATLSCRASQ |
| | | SVSSSYLAWYQQKPGQAPRLLIYGASSRATGIPDRFSGNGSGTDFTLTISRLE |
| | | PEDFAVYYCQQYGSPPRFTFGPGTKVDIK |
| BCMA_EBB- | 1142 | GAGGTGCAGTTGGTCGAAAGCGGGGGCGGGCTTGTGCAGCCTGGCGGATCACT |
| C1980-G4- nt | | GCGGCTGTCCTGCGCGGCATCAGGCTTCACGTTTTCTTCCTACGCCATGTCCT |
| ScFv domain | | GGGTGCGCCAGGCCCCTGGAAAGGGACTGGAATGGGTGTCCGCGATTTCGGGG |
| | | TCCGGCGGGAGCACCTACTACGCCGATTCCGTGAAGGGCCGCTTCACTATCTC |
| | | GCGGGACAACTCCAAGAACACCCTCTACCTCCAAATGAATAGCCTGCGGGCCG |
| | | AGGATACCGCCGTCTACTATTGCGCTAAGGTCGTGCGCGACGGAATGGACGTG |
| | | TGGGGACAGGGTACCACCGTGACAGTGTCCTCGGGGGGAGGCGGTAGCGGCGG |
| | | AGGAGGAAGCGGTGGTGGAGGTTCCGAGATTGTGCTGACTCAATCACCCGCGA |
| | | CCCTGAGCCTGTCCCCCGGCGAAAGGGCCACTCTGTCCTGTCGGGCCAGCCAA |
| | | TCAGTCTCCTCCTCGTACCTGGCCTGGTACCAGCAGAAGCCAGGACAGGCTCC |
| | | GAGACTCCTTATCTATGGCGCATCCTCCCGCGCCACCGGAATCCCGGATAGGT |
| | | TCTCGGGAAACGGATCGGGGACCGACTTCACTCTCACCATCTCCCGGCTGGAA |
| | | CCGGAGGACTTCGCCGTGTACTACTGCCAGCAGTACGGCAGCCCGCCTAGATT |
| | | CACTTTCGGCCCCGGCACCAAAGTGGACATCAAG |
| BCMA_EBB- | 1143 | EVQLVESGGGLVQPGGSLRLSCAASGFTFSSYAMSWVRQAPGKGLEWVSAISG |
| C1980-G4- aa | | SGGSTYYADSVKGRFTISRDNSKNTLYLQMNSLRAEDTAVYYCAKVVRDGMDV |
| VH | | WGQGTTVTVSS |
| BCMA_EBB- | 1144 | EIVLTQSPATLSLSPGERATLSCRASQSVSSSYLAWYQQKPGQAPRLLIYGAS |
| C1980-G4- aa | | SRATGIPDRFSGNGSGTDFTLTISRLEPEDFAVYYCQQYGSPPRFTFGPGTKV |
| VL | | DIK |
| BCMA_EBB- | 1145 | MALPVTALLLPLALLLHAARPEVQLVESGGGLVQPGGSLRLSCAASGFTFSSY |
| C1980-G4- aa | | AMSWVRQAPGKGLEWVSAISGSGGSTYYADSVKGRFTISRDNSKNTLYLQMNS |
| Full CART | | LRAEDTAVYYCAKVVRDGMDVWGQGTTVTVSSGGGGSGGGGSGGGGSEIVLTQ |
| | | SPATLSLSPGERATLSCRASQSVSSSYLAWYQQKPGQAPRLLIYGASSRATGI |
| | | PDRFSGNGSGTDFTLTISRLEPEDFAVYYCQQYGSPPRFTFGPGTKVDIKTTT |
| | | PAPRPPTPAPTIASQPLSLRPEACRPAAGGAVHTRGLDFACDIYIWAPLAGTC |
| | | GVLLLSLVITLYCKRGRKKLLYIFKQPFMRPVQTTQEEDGCSCRFPEEEEGGC |
| | | ELRVKFSRSADAPAYKQGQNQLYNELNLGRREEYDVLDKRRGRDPEMGGKPRR |
| | | KNPQEGLYNELQKDKMAEAYSEIGMKGERRRGKGHDGLYQGLSTATKDTYDAL |
| | | HMQALPPR |
| BCMA_EBB- | 1146 | ATGGCCCTCCCTGTCACCGCCCTGCTGCTTCCGCTGGCTCTTCTGCTCCACGC |
| C1980-G4- nt | | CGCTCGGCCCGAGGTGCAGTTGGTCGAAAGCGGGGGCGGGCTTGTGCAGCCTG |
| Full CART | | GCGGATCACTGCGGCTGTCCTGCGCGGCATCAGGCTTCACGTTTTCTTCCTAC |
| | | GCCATGTCCTGGGTGCGCCAGGCCCCTGGAAAGGGACTGGAATGGGTGTCCGC |
| | | GATTTCGGGGTCCGGCGGGAGCACCTACTACGCCGATTCCGTGAAGGGCCGCT |
| | | TCACTATCTCGCGGGACAACTCCAAGAACACCCTCTACCTCCAAATGAATAGC |
| | | CTGCGGGCCGAGGATACCGCCGTCTACTATTGCGCTAAGGTCGTGCGCGACGG |
| | | AATGGACGTGTGGGGACAGGGTACCACCGTGACAGTGTCCTCGGGGGGAGGCG |
| | | GTAGCGGCGGAGGAGGAAGCGGTGGTGGAGGTTCCGAGATTGTGCTGACTCAA |
| | | TCACCCGCGACCCTGAGCCTGTCCCCCGGCGAAAGGGCCACTCTGTCCTGTCG |
| | | GGCCAGCCAATCAGTCTCCTCCTCGTACCTGGCCTGGTACCAGCAGAAGCCAG |
| | | GACAGGCTCCGAGACTCCTTATCTATGGCGCATCCTCCCGCGCCACCGGAATC |
| | | CCGGATAGGTTCTCGGGAAACGGATCGGGGACCGACTTCACTCTCACCATCTC |
| | | CCGGCTGGAACCGGAGGACTTCGCCGTGTACTACTGCCAGCAGTACGGCAGCC |
| | | CGCCTAGATTCACTTTCGGCCCCGGCACCAAAGTGGACATCAAGACCACTACC |
| | | CCAGCACCGAGGCCACCCACCCCGGCTCCTACCATCGCCTCCCAGCCTCTGTC |
| | | CCTGCGTCCGGAGGCATGTAGACCCGCAGCTGGTGGGGCCGTGCATACCCGGG |
| | | GTCTTGACTTCGCCTGCGATATCTACATTTGGGCCCCTCTGGCTGGTACTTGC |
| | | GGGGTCCTGCTGCTTTCACTCGTGATCACTCTTTACTGTAAGCGCGGTCGGAA |
| | | GAAGCTGCTGTACATCTTTAAGCAACCCTTCATGAGGCCTGTGCAGACTACTC |
| | | AAGAGGAGGACGGCTGTTCATGCCGGTTCCCAGAGGAGGAGGAAGGCGGCTGC |
| | | GAACTGCGCGTGAAATTCAGCCGCAGCGCAGATGCTCCAGCCTACAAGCAGGG |
| | | GCAGAACCAGCTCTACAACGAACTCAATCTTGGTCGGAGAGAGGAGTACGACG |
| | | TGCTGGACAAGCGGAGAGGACGGGACCCAGAAATGGGCGGGAAGCCGCGCAGA |
| | | AAGAATCCCCAAGAGGGCCTGTACAACGAGCTCCAAAAGGATAAGATGGCAGA |
| | | AGCCTATAGCGAGATTGGTATGAAAGGGGAACGCAGAAGAGGCAAAGGCCACG |
| | | ACGGACTGTACCAGGGACTCAGCACCGCCACCAAGGACACCTATGACGCTCTT |
| | | CACATGCAGGCCCTGCCGCCTCGG |

BCMA_EBB-C1980-D2

| | | |
|---|---|---|
| BCMA_EBB- | 1147 | EVQLLESGGGLVQPGGSLRLSCAASGFTFSSYAMSWVRQAPGKGLEWVSAISG |
| C1980-D2- aa | | SGGSTYYADSVKGRFTISRDNSKNTLYLQMNSLRAEDTAVYYCAKIPQTGTFD |
| ScFv domain | | YWGQGTLVTVSSGGGGSGGGGSGGGGSEIVLTQSPGTLSLSPGERATLSCRAS |
| | | QSVSSSYLAWYQQRPGQAPRLLIYGASSRATGIPDRFSGSGSGTDFTLTISRL |
| | | EPEDFAVYYCQHYGSSPSWTFGQGTRLEIK |
| BCMA_EBB- | 1148 | GAAGTGCAGCTGCTGGAGTCCGGCGGTGGATTGGTGCAACCGGGGGGATCGCT |
| C1980-D2- nt | | CAGACTGTCCTGTGCGGCGTCAGGCTTCACCTTCTCGAGCTACGCCATGTCAT |
| ScFv domain | | GGGTCAGACAGGCCCCTGGAAAGGGTCTGGAATGGGTGTCCGCCATTTCCGGG |
| | | AGCGGGGGATCTACATACTACGCCGATAGCGTGAAGGGCCGCTTCACCATTTC |
| | | CCGGGACAACTCCAAGAACACTCTCTATCTGCAAATGAACTCCCTCCGCGCTG |
| | | AGGACACTGCCGTGTACTACTGCGCCAAAATCCCTCAGACCGGCACCTTCGAC |
| | | TACTGGGGACAGGGGACTCTGGTCACCGTCAGCAGCGGTGGCGGAGGTTCGGG |
| | | GGGAGGAGGAAGCGGCGGCGGAGGGTCCGAGATTGTGCTGACCCAGTCACCCG |
| | | GCACTTTGTCCCTGTCGCCTGGAGAAAGGGCCACCCTTTCCTGCCGGGCATCC |
| | | CAATCCGTGTCCTCCTCGTACCTGGCCTGGTACCAGCAGAGGCCCGGACAGGC |
| | | CCCACGGCTTCTGATCTACGGAGCAAGCAGCCGCGCGACCGGTATCCCGGACC |
| | | GGTTTTCGGGCTCGGGCTCAGGAACTGACTTCACCCTCACCATCTCCCGCCTG |
| | | GAACCCGAAGATTTCGCTGTGTATTACTGCCAGCACTACGGCAGCTCCCCGTC |
| | | CTGGACGTTCGGCCAGGGAACTCGGCTGGAGATCAAG |
| BCMA_EBB- | 1149 | EVQLLESGGGLVQPGGSLRLSCAASGFTFSSYAMSWVRQAPGKGLEWVSAISG |
| C1980-D2- aa | | SGGSTYYADSVKGRFTISRDNSKNTLYLQMNSLRAEDTAVYYCAKIPQTGTFD |
| VH | | YWGQGTLVTVSS |
| BCMA_EBB- | 1150 | EIVLTQSPGTLSLSPGERATLSCRASQSVSSSYLAWYQQRPGQAPRLLIYGAS |
| C1980-D2- aa | | SRATGIPDRFSGSGSGTDFTLTISRLEPEDFAVYYCQHYGSSPSWTFGQGTRL |
| VL | | EIK |
| BCMA_EBB- | 1151 | MALPVTALLLPLALLLHAARPEVQLLESGGGLVQPGGSLRLSCAASGFTFSSY |
| C1980-D2- aa | | AMSWVRQAPGKGLEWVSAISGSGGSTYYADSVKGRFTISRDNSKNTLYLQMNS |
| Full CART | | LRAEDTAVYYCAKIPQTGTFDYWGQGTLVTVSSGGGGSGGGGSGGGGSEIVLT |
| | | QSPGTLSLSPGERATLSCRASQSVSSSYLAWYQQRPGQAPRLLIYGASSRATG |
| | | IPDRFSGSGSGTDFTLTISRLEPEDFAVYYCQHYGSSPSWTFGQGTRLEIKTT |
| | | TPAPRPPTPAPTIASQPLSLRPEACRPAAGGAVHTRGLDFACDIYIWAPLAGT |
| | | CGVLLLSLVITLYCKRGRKKLLYIFKQPFMRPVQTTQEEDGCSCRFPEEEEGG |
| | | CELRVKFSRSADAPAYKQGQNQLYNELNLGRREEYDVLDKRRGRDPEMGGKPR |
| | | RKNPQEGLYNELQKDKMAEAYSEIGMKGERRRGKGHDGLYQGLSTATKDTYDA |
| | | LHMQALPPR |
| BCMA_EBB- | 1152 | ATGGCCCTCCCTGTCACCGCCCTGCTGCTTCCGCTGGCTCTTCTGCTCCACGC |
| C1980-D2- nt | | CGCTCGGCCCGAAGTGCAGCTGCTGGAGTCCGGCGGTGGATTGGTGCAACCGG |
| Full CART | | GGGGATCGCTCAGACTGTCCTGTGCGGCGTCAGGCTTCACCTTCTCGAGCTAC |
| | | GCCATGTCATGGGTCAGACAGGCCCCTGGAAAGGGTCTGGAATGGGTGTCCGC |
| | | CATTTCCGGGAGCGGGGGATCTACATACTACGCCGATAGCGTGAAGGGCCGCT |
| | | TCACCATTTCCCGGGACAACTCCAAGAACACTCTCTATCTGCAAATGAACTCC |
| | | CTCCGCGCTGAGGACACTGCCGTGTACTACTGCGCCAAAATCCCTCAGACCGG |
| | | CACCTTCGACTACTGGGGACAGGGGACTCTGGTCACCGTCAGCAGCGGTGGCG |
| | | GAGGTTCGGGGGGAGGAGGAAGCGGCGGCGGAGGGTCCGAGATTGTGCTGACC |
| | | CAGTCACCCGGCACTTTGTCCCTGTCGCCTGGAGAAAGGGCCACCCTTTCCTG |
| | | CCGGGCATCCCAATCCGTGTCCTCCTCGTACCTGGCCTGGTACCAGCAGAGGC |
| | | CCGGACAGGCCCCACGGCTTCTGATCTACGGAGCAAGCAGCCGCGCGACCGGT |
| | | ATCCCGGACCGGTTTTCGGGCTCGGGCTCAGGAACTGACTTCACCCTCACCAT |
| | | CTCCCGCCTGGAACCCGAAGATTTCGCTGTGTATTACTGCCAGCACTACGGCA |
| | | GCTCCCCGTCCTGGACGTTCGGCCAGGGAACTCGGCTGGAGATCAAGACCACT |
| | | ACCCCAGCACCGAGGCCACCCACCCCGGCTCCTACCATCGCCTCCCAGCCTCT |
| | | GTCCCTGCGTCCGGAGGCATGTAGACCCGCAGCTGGTGGGGCCGTGCATACCC |
| | | GGGGTCTTGACTTCGCCTGCGATATCTACATTTGGGCCCCTCTGGCTGGTACT |
| | | TGCGGGGTCCTGCTGCTTTCACTCGTGATCACTCTTTACTGTAAGCGCGGTCG |
| | | GAAGAAGCTGCTGTACATCTTTAAGCAACCCTTCATGAGGCCTGTGCAGACTA |
| | | CTCAAGAGGAGGACGGCTGTTCATGCCGGTTCCCAGAGGAGGAGGAAGGCGGC |
| | | TGCGAACTGCGCGTGAAATTCAGCCGCAGCGCAGATGCTCCAGCCTACAAGCA |
| | | GGGGCAGAACCAGCTCTACAACGAACTCAATCTTGGTCGGAGAGAGGAGTACG |
| | | ACGTGCTGGACAAGCGGAGAGGACGGGACCCAGAAATGGGCGGGAAGCCGCGC |
| | | AGAAAGAATCCCCAAGAGGGCCTGTACAACGAGCTCCAAAAGGATAAGATGGC |
| | | AGAAGCCTATAGCGAGATTGGTATGAAAGGGGAACGCAGAAGAGGCAAAGGCC |
| | | ACGACGGACTGTACCAGGGACTCAGCACCGCCACCAAGGACACCTATGACGCT |
| | | CTTCACATGCAGGCCCTGCCGCCTCGG |

BCMA_EBB-C1978-A10

| | | |
|---|---|---|
| BCMA_EBB- | 1153 | EVQLVETGGGLVQPGGSLRLSCAASGFTFSSYAMSWVRQAPGKGLEWVSAISG |
| C1978-A10- aa | | SGGSTYYADSVKGRFTMSRENDKNSVFLQMNSLRVEDTGVYYCARANYKRELR |
| ScFv domain | | YYYGMDVWGQGTMVTVSSGGGGSGGGGSGGGGSEIVMTQSPGTLSLSPGESAT |
| | | LSCRASQRVASNYLAWYQHKPGQAPSLLISGASSRATGVPDRFSGSGSGTDFT |
| | | LAISRLEPEDSAVYYCQHYDSSPSWTFGQGTKVEIK |
| BCMA_EBB- | 1154 | GAAGTGCAACTGGTGGAAACCGGTGGAGGACTCGTGCAGCCTGGCGGCAGCCT |
| C1978-A10- nt | | CCGGCTGAGCTGCGCCGCTTCGGGATTCACCTTTTCCTCCTACGCGATGTCTT |
| ScFv domain | | GGGTCAGACAGGCCCCCGGAAAGGGGCTGGAATGGGTGTCAGCCATCTCCGGC |
| | | TCCGGCGGATCAACGTACTACGCCGACTCCGTGAAAGGCCGGTTCACCATGTC |
| | | GCGCGAGAATGACAAGAACTCCGTGTTCCTGCAAATGAACTCCCTGAGGGTGG |
| | | AGGACACCGGAGTGTACTATTGTGCGCGCGCCAACTACAAGAGAGAGCTGCGG |
| | | TACTACTACGGAATGGACGTCTGGGGACAGGGAACTATGGTGACCGTGTCATC |
| | | CGGTGGAGGGGGAAGCGGCGGTGGAGGCAGCGGGGGCGGGGGTTCAGAAATTG |
| | | TCATGACCCAGTCCCCGGGAACTCTTTCCCTCTCCCCCGGGGAATCCGCGACT |
| | | TTGTCCTGCCGGGCCAGCCAGCGCGTGGCCTCGAACTACCTCGCATGGTACCA |
| | | GCATAAGCCAGGCCAAGCCCCTTCCCTGCTGATTTCCGGGGCTAGCAGCCGCG |
| | | CCACTGGCGTGCCGGATAGGTTCTCGGGAAGCGGCTCGGGTACCGATTTCACC |
| | | CTGGCAATCTCGCGGCTGGAACCGGAGGATTCGGCCGTGTACTACTGCCAGCA |
| | | CTATGACTCATCCCCCTCCTGGACATTCGGACAGGGCACCAAGGTCGAGATCA |
| | | AG |
| BCMA_EBB- | 1155 | EVQLVETGGGLVQPGGSLRLSCAASGFTFSSYAMSWVRQAPGKGLEWVSAISG |
| C1978-A10- aa | | SGGSTYYADSVKGRFTMSRENDKNSVFLQMNSLRVEDTGVYYCARANYKRELR |
| VH | | YYYGMDVWGQGTMVTVSS |
| BCMA_EBB- | 1156 | EIVMTQSPGTLSLSPGESATLSCRASQRVASNYLAWYQHKPGQAPSLLISGAS |
| C1978-A10- aa | | SRATGVPDRFSGSGSGTDFTLAISRLEPEDSAVYYCQHYDSSPSWTFGQGTKV |
| VL | | EIK |
| BCMA_EBB- | 1157 | MALPVTALLLPLALLLHAARPEVQLVETGGGLVQPGGSLRLSCAASGFTFSSY |
| C1978-A10- aa | | AMSWVRQAPGKGLEWVSAISGSGGSTYYADSVKGRFTMSRENDKNSVFLQMNS |
| Full | CART | LRVEDTGVYYCARANYKRELRYYYGMDVWGQGTMVTVSSGGGGSGGGGSGGGG |
| | | SEIVMTQSPGTLSLSPGESATLSCRASQRVASNYLAWYQHKPGQAPSLLISGA |
| | | SSRATGVPDRFSGSGSGTDFTLAISRLEPEDSAVYYCQHYDSSPSWTFGQGTK |
| | | VEIKTTTPAPRPPTPAPTIASQPLSLRPEACRPAAGGAVHTRGLDFACDIYIW |
| | | APLAGTCGVLLLSLVITLYCKRGRKKLLYIFKQPFMRPVQTTQEEDGCSCRFP |
| | | EEEEGGCELRVKFSRSADAPAYKQGQNQLYNELNLGRREEYDVLDKRRGRDPE |
| | | MGGKPRRKNPQEGLYNELQKDKMAEAYSEIGMKGERRRGKGHDGLYQGLSTAT |
| | | KDTYDALHMQALPPR |
| BCMA_EBB- | 1158 | ATGGCCCTCCCTGTCACCGCCCTGCTGCTTCCGCTGGCTCTTCTGCTCCACGC |
| C1978-A10- nt | | CGCTCGGCCCGAAGTGCAACTGGTGGAAACCGGTGGAGGACTCGTGCAGCCTG |
| Full CART | | GCGGCAGCCTCCGGCTGAGCTGCGCCGCTTCGGGATTCACCTTTTCCTCCTAC |
| | | GCGATGTCTTGGGTCAGACAGGCCCCCGGAAAGGGGCTGGAATGGGTGTCAGC |
| | | CATCTCCGGCTCCGGCGGATCAACGTACTACGCCGACTCCGTGAAAGGCCGGT |
| | | TCACCATGTCGCGCGAGAATGACAAGAACTCCGTGTTCCTGCAAATGAACTCC |
| | | CTGAGGGTGGAGGACACCGGAGTGTACTATTGTGCGCGCGCCAACTACAAGAG |
| | | AGAGCTGCGGTACTACTACGGAATGGACGTCTGGGGACAGGGAACTATGGTGA |
| | | CCGTGTCATCCGGTGGAGGGGGAAGCGGCGGTGGAGGCAGCGGGGGCGGGGGT |
| | | TCAGAAATTGTCATGACCCAGTCCCCGGGAACTCTTTCCCTCTCCCCCGGGGA |
| | | ATCCGCGACTTTGTCCTGCCGGGCCAGCCAGCGCGTGGCCTCGAACTACCTCG |
| | | CATGGTACCAGCATAAGCCAGGCCAAGCCCCTTCCCTGCTGATTTCCGGGGCT |
| | | AGCAGCCGCGCCACTGGCGTGCCGGATAGGTTCTCGGGAAGCGGCTCGGGTAC |
| | | CGATTTCACCCTGGCAATCTCGCGGCTGGAACCGGAGGATTCGGCCGTGTACT |
| | | ACTGCCAGCACTATGACTCATCCCCCTCCTGGACATTCGGACAGGGCACCAAG |
| | | GTCGAGATCAAGACCACTACCCCAGCACCGAGGCCACCCACCCCGGCTCCTAC |
| | | CATCGCCTCCCAGCCTCTGTCCCTGCGTCCGGAGGCATGTAGACCCGCAGCTG |
| | | GTGGGGCCGTGCATACCCGGGGTCTTGACTTCGCCTGCGATATCTACATTTGG |
| | | GCCCCTCTGGCTGGTACTTGCGGGGTCCTGCTGCTTTCACTCGTGATCACTCT |
| | | TTACTGTAAGCGCGGTCGGAAGAAGCTGCTGTACATCTTTAAGCAACCCTTCA |
| | | TGAGGCCTGTGCAGACTACTCAAGAGGAGGACGGCTGTTCATGCCGGTTCCCA |
| | | GAGGAGGAGGAAGGCGGCTGCGAACTGCGCGTGAAATTCAGCCGCAGCGCAGA |
| | | TGCTCCAGCCTACAAGCAGGGGCAGAACCAGCTCTACAACGAACTCAATCTTG |
| | | GTCGGAGAGAGGAGTACGACGTGCTGGACAAGCGGAGAGGACGGGACCCAGAA |
| | | ATGGGCGGGAAGCCGCGCAGAAAGAATCCCCAAGAGGGCCTGTACAACGAGCT |
| | | CCAAAAGGATAAGATGGCAGAAGCCTATAGCGAGATTGGTATGAAAGGGGAAC |
| | | GCAGAAGAGGCAAAGGCCACGACGGACTGTACCAGGGACTCAGCACCGCCACC |
| | | AAGGACACCTATGACGCTCTTCACATGCAGGCCCTGCCGCCTCGG |

BCMA_EBB-C1978-D4

| | | |
|---|---|---|
| BCMA_EBB- | 1159 | EVQLLETGGGLVQPGGSLRLSCAASGFSFSSYAMSWVRQAPGKGLEWVSAISG |
| C1978-D4- aa | | SGGSTYYADSVKGRFTISRDNSKNTLYLQMNSLRAEDTAVYYCAKALVGATGA |
| ScFv domain | | FDIWGQGTLVTVSSGGGGSGGGGSGGGGSEIVLTQSPGTLSLSPGERATLSCR |
| | | ASQSLSSNFLAWYQQKPGQAPGLLIYGASNWATGTPDRFSGSGSGTDFTLTIT |
| | | RLEPEDFAVYYCQYYGTSPMYTFGQGTKVEIK |
| BCMA_EBB- | 1160 | GAAGTGCAGCTGCTCGAAACCGGTGGAGGGCTGGTGCAGCCAGGGGGCTCCCT |
| C1978-D4- nt | | GAGGCTTTCATGCGCCGCTAGCGGATTCTCCTTCTCCTCTTACGCCATGTCGT |
| ScFv domain | | GGGTCCGCCAAGCCCCTGGAAAAGGCCTGGAATGGGTGTCCGCGATTTCCGGG |
| | | AGCGGAGGTTCGACCTATTACGCCGACTCCGTGAAGGGCCGCTTTACCATCTC |
| | | CCGGGATAACTCCAAGAACACTCTGTACCTCCAAATGAACTCGCTGAGAGCCG |
| | | AGGACACCGCCGTGTATTACTGCGCGAAGGCGCTGGTCGGCGCGACTGGGGCA |
| | | TTCGACATCTGGGGACAGGGAACTCTTGTGACCGTGTCGAGCGGAGGCGGCGG |
| | | CTCCGGCGGAGGAGGGAGCGGGGGCGGTGGTTCCGAAATCGTGTTGACTCAGT |
| | | CCCCGGGAACCCTGAGCTTGTCACCCGGGGAGCGGGCCACTCTCTCCTGTCGC |
| | | GCCTCCCAATCGCTCTCATCCAATTTCCTGGCCTGGTACCAGCAGAAGCCCGG |
| | | ACAGGCCCCGGGCCTGCTCATCTACGGCGCTTCAAACTGGGCAACGGGAACCC |
| | | CTGATCGGTTCAGCGGAAGCGGATCGGGTACTGACTTTACCCTGACCATCACC |
| | | AGACTGGAACCGGAGGACTTCGCCGTGTACTACTGCCAGTACTACGGCACCTC |
| | | CCCCATGTACACATTCGGACAGGGTACCAAGGTCGAGATTAAG |
| BCMA_EBB- | 1161 | EVQLLETGGGLVQPGGSLRLSCAASGFSFSSYAMSWVRQAPGKGLEWVSAISG |
| C1978-D4- aa | | SGGSTYYADSVKGRFTISRDNSKNTLYLQMNSLRAEDTAVYYCAKALVGATGA |
| VH | | FDIWGQGTLVTVSS |
| BCMA_EBB- | 1162 | EIVLTQSPGTLSLSPGERATLSCRASQSLSSNFLAWYQQKPGQAPGLLIYGAS |
| C1978-D4- aa | | NWATGTPDRFSGSGSGTDFTLTITRLEPEDFAVYYCQYYGTSPMYTFGQGTKV |
| VL | | EIK |
| BCMA_EBB- | 1163 | MALPVTALLLPLALLLHAARPEVQLLETGGGLVQPGGSLRLSCAASGFSFSSY |
| C1978-D4- aa | | AMSWVRQAPGKGLEWVSAISGSGGSTYYADSVKGRFTISRDNSKNTLYLQMNS |
| Full CART | | LRAEDTAVYYCAKALVGATGAFDIWGQGTLVTVSSGGGGSGGGGSGGGGSEIV |
| | | LTQSPGTLSLSPGERATLSCRASQSLSSNFLAWYQQKPGQAPGLLIYGASNWA |
| | | TGTPDRFSGSGSGTDFTLTITRLEPEDFAVYYCQYYGTSPMYTFGQGTKVEIK |
| | | TTTPAPRPPTPAPTIASQPLSLRPEACRPAAGGAVHTRGLDFACDIYIWAPLA |
| | | GTCGVLLLSLVITLYCKRGRKKLLYIFKQPFMRPVQTTQEEDGCSCRFPEEEE |
| | | GGCELRVKFSRSADAPAYKQGQNQLYNELNLGRREEYDVLDKRRGRDPEMGGK |
| | | PRRKNPQEGLYNELQKDKMAEAYSEIGMKGERRRGKGHDGLYQGLSTATKDTY |
| | | DALHMQALPPR |
| BCMA_EBB- | 1164 | ATGGCCCTCCCTGTCACCGCCCTGCTGCTTCCGCTGGCTCTTCTGCTCCACGC |
| C1978-D4- nt | | CGCTCGGCCCGAAGTGCAGCTGCTCGAAACCGGTGGAGGGCTGGTGCAGCCAG |
| Full CART | | GGGGCTCCCTGAGGCTTTCATGCGCCGCTAGCGGATTCTCCTTCTCCTCTTAC |
| | | GCCATGTCGTGGGTCCGCCAAGCCCCTGGAAAAGGCCTGGAATGGGTGTCCGC |
| | | GATTTCCGGGAGCGGAGGTTCGACCTATTACGCCGACTCCGTGAAGGGCCGCT |
| | | TTACCATCTCCCGGGATAACTCCAAGAACACTCTGTACCTCCAAATGAACTCG |
| | | CTGAGAGCCGAGGACACCGCCGTGTATTACTGCGCGAAGGCGCTGGTCGGCGC |
| | | GACTGGGGCATTCGACATCTGGGGACAGGGAACTCTTGTGACCGTGTCGAGCG |
| | | GAGGCGGCGGCTCCGGCGGAGGAGGGAGCGGGGGCGGTGGTTCCGAAATCGTG |
| | | TTGACTCAGTCCCCGGGAACCCTGAGCTTGTCACCCGGGGAGCGGGCCACTCT |
| | | CTCCTGTCGCGCCTCCCAATCGCTCTCATCCAATTTCCTGGCCTGGTACCAGC |
| | | AGAAGCCCGGACAGGCCCCGGGCCTGCTCATCTACGGCGCTTCAAACTGGGCA |
| | | ACGGGAACCCCTGATCGGTTCAGCGGAAGCGGATCGGGTACTGACTTTACCCT |
| | | GACCATCACCAGACTGGAACCGGAGGACTTCGCCGTGTACTACTGCCAGTACT |
| | | ACGGCACCTCCCCCATGTACACATTCGGACAGGGTACCAAGGTCGAGATTAAG |
| | | ACCACTACCCCAGCACCGAGGCCACCCACCCCGGCTCCTACCATCGCCTCCCA |
| | | GCCTCTGTCCCTGCGTCCGGAGGCATGTAGACCCGCAGCTGGTGGGGCCGTGC |
| | | ATACCCGGGGTCTTGACTTCGCCTGCGATATCTACATTTGGGCCCCTCTGGCT |
| | | GGTACTTGCGGGGTCCTGCTGCTTTCACTCGTGATCACTCTTTACTGTAAGCG |
| | | CGGTCGGAAGAAGCTGCTGTACATCTTTAAGCAACCCTTCATGAGGCCTGTGC |
| | | AGACTACTCAAGAGGAGGACGGCTGTTCATGCCGGTTCCCAGAGGAGGAGGAA |
| | | GGCGGCTGCGAACTGCGCGTGAAATTCAGCCGCAGCGCAGATGCTCCAGCCTA |
| | | CAAGCAGGGGCAGAACCAGCTCTACAACGAACTCAATCTTGGTCGGAGAGAGG |
| | | AGTACGACGTGCTGGACAAGCGGAGAGGACGGGACCCAGAAATGGGCGGGAAG |
| | | CCGCGCAGAAAGAATCCCCAAGAGGGCCTGTACAACGAGCTCCAAAAGGATAA |
| | | GATGGCAGAAGCCTATAGCGAGATTGGTATGAAAGGGGAACGCAGAAGAGGCA |
| | | AAGGCCACGACGGACTGTACCAGGGACTCAGCACCGCCACCAAGGACACCTAT |
| | | GACGCTCTTCACATGCAGGCCCTGCCGCCTCGG |

BCMA_EBB-C1980-A2

| | | |
|---|---|---|
| BCMA_EBB- | 1165 | EVQLLESGGGLVQPGGSLRLSCAASGFTFSSYAMSWVRQAPGKGLEWVSAISG |
| C1980-A2- aa | | SGGSTYYADSVKGRFTISRDNSKNTLYLQMNSLRAEDTAVYYCVLWFGEGFDP |
| ScFv domain | | WGQGTLVTVSSGGGGSGGGGSGGGGSDIVLTQSPLSLPVTPGEPASISCRSSQ |
| | | SLLHSNGYNYLDWYLQKPGQSPQLLIYLGSNRASGVPDRFSGSGSGTDFTLKI |
| | | SRVEAEDVGVYYCMQALQTPLTFGGGTKVD1K |
| BCMA_EBB- | 1166 | GAAGTGCAGCTGCTTGAGAGCGGTGGAGGTCTGGTGCAGCCCGGGGGATCACT |
| C1980-A2- nt | | GCGCCTGTCCTGTGCCGCGTCCGGTTTCACTTTCTCCTCGTACGCCATGTCGT |
| ScFv domain | | GGGTCAGACAGGCACCGGGAAAGGGACTGGAATGGGTGTCAGCCATTTCGGGT |
| | | TCGGGGGGCAGCACCTACTACGCTGACTCCGTGAAGGGCCGGTTCACCATTTC |
| | | CCGCGACAACTCCAAGAACACCTTGTACCTCCAAATGAACTCCCTGCGGGCCG |
| | | AAGATACCGCCGTGTATTACTGCGTGCTGTGGTTCGGAGAGGGATTCGACCCG |
| | | TGGGGACAAGGAACACTCGTGACTGTGTCATCCGGCGGAGGCGGCAGCGGTGG |
| | | CGGCGGTTCCGGCGGCGGCGGATCTGACATCGTGTTGACCCAGTCCCCTCTGA |
| | | GCCTGCCGGTCACTCCTGGCGAACCAGCCAGCATCTCCTGCCGGTCGAGCCAG |
| | | TCCCTCCTGCACTCCAATGGGTACAACTACCTCGATTGGTATCTGCAAAAGCC |
| | | GGGCCAGAGCCCCCAGCTGCTGATCTACCTTGGGTCAAACCGCGCTTCCGGGG |
| | | TGCCTGATAGATTCTCCGGGTCCGGGAGCGGAACCGACTTTACCCTGAAAATC |
| | | TCGAGGGTGGAGGCCGAGGACGTCGGAGTGTACTACTGCATGCAGGCGCTCCA |
| | | GACTCCCCTGACCTTCGGAGGAGGAACGAAGGTCGACATCAAGA |
| BCMA_EBB- | 1167 | EVQLLESGGGLVQPGGSLRLSCAASGFTFSSYAMSWVRQAPGKGLEWVSAISG |
| C1980-A2- aa | | SGGSTYYADSVKGRFTISRDNSKNTLYLQMNSLRAEDTAVYYCVLWFGEGFDP |
| VH | | WGQGTLVTVSS |
| BCMA_EBB- | 1168 | DIVLTQSPLSLPVTPGEPASISCRSSQSLLHSNGYNYLDWYLQKPGQSPQLLI |
| C1980-A2- aa | | YLGSNRASGVPDRFSGSGSGTDFTLKISRVEAEDVGVYYCMQALQTPLTFGGG |
| VL | | TKVDIK |
| BCMA_EBB- | 1169 | MALPVTALLLPLALLLHAARPEVQLLESGGGLVQPGGSLRLSCAASGFTFSSY |
| C1980-A2- aa | | AMSWVRQAPGKGLEWVSAISGSGGSTYYADSVKGRFTISRDNSKNTLYLQMNS |
| Full CART | | LRAEDTAVYYCVLWFGEGFDPWGQGTLVTVSSGGGGSGGGGSGGGGSDIVLTQ |
| | | SPLSLPVTPGEPASISCRSSQSLLHSNGYNYLDWYLQKPGQSPQLLIYLGSNR |
| | | ASGVPDRFSGSGSGTDFTLKISRVEAEDVGVYYCMQALQTPLTFGGGTKVDIK |
| | | TTTPAPRPPTPAPTIASQPLSLRPEACRPAAGGAVHTRGLDFACDIYIWAPLA |
| | | GTCGVLLLSLVITLYCKRGRKKLLYIFKQPFMRPVQTTQEEDGCSCRFPEEEE |
| | | GGCELRVKFSRSADAPAYKQGQNQLYNELNLGRREEYDVLDKRRGRDPEMGGK |
| | | PRRKNPQEGLYNELQKDKMAEAYSEIGMKGERRRGKGHDGLYQGLSTATKDTY |
| | | DALHMQALPPR |
| BCMA_EBB- | 1170 | ATGGCCCTCCCTGTCACCGCCCTGCTGCTTCCGCTGGCTCTTCTGCTCCACGC |
| C1980-A2- nt | | CGCTCGGCCCGAAGTGCAGCTGCTTGAGAGCGGTGGAGGTCTGGTGCAGCCCG |
| Full CART | | GGGGATCACTGCGCCTGTCCTGTGCCGCGTCCGGTTTCACTTTCTCCTCGTAC |
| | | GCCATGTCGTGGGTCAGACAGGCACCGGGAAAGGGACTGGAATGGGTGTCAGC |
| | | CATTTCGGGTTCGGGGGGCAGCACCTACTACGCTGACTCCGTGAAGGGCCGGT |
| | | TCACCATTTCCCGCGACAACTCCAAGAACACCTTGTACCTCCAAATGAACTCC |
| | | CTGCGGGCCGAAGATACCGCCGTGTATTACTGCGTGCTGTGGTTCGGAGAGGG |
| | | ATTCGACCCGTGGGGACAAGGAACACTCGTGACTGTGTCATCCGGCGGAGGCG |
| | | GCAGCGGTGGCGGCGGTTCCGGCGGCGGCGGATCTGACATCGTGTTGACCCAG |
| | | TCCCCTCTGAGCCTGCCGGTCACTCCTGGCGAACCAGCCAGCATCTCCTGCCG |
| | | GTCGAGCCAGTCCCTCCTGCACTCCAATGGGTACAACTACCTCGATTGGTATC |
| | | TGCAAAAGCCGGGCCAGAGCCCCCAGCTGCTGATCTACCTTGGGTCAAACCGC |
| | | GCTTCCGGGGTGCCTGATAGATTCTCCGGGTCCGGGAGCGGAACCGACTTTAC |
| | | CCTGAAAATCTCGAGGGTGGAGGCCGAGGACGTCGGAGTGTACTACTGCATGC |
| | | AGGCGCTCCAGACTCCCCTGACCTTCGGAGGAGGAACGAAGGTCGACATCAAG |
| | | ACCACTACCCCAGCACCGAGGCCACCCACCCCGGCTCCTACCATCGCCTCCCA |
| | | GCCTCTGTCCCTGCGTCCGGAGGCATGTAGACCCGCAGCTGGTGGGGCCGTGC |
| | | ATACCCGGGGTCTTGACTTCGCCTGCGATATCTACATTTGGGCCCCTCTGGCT |
| | | GGTACTTGCGGGGTCCTGCTGCTTTCACTCGTGATCACTCTTTACTGTAAGCG |
| | | CGGTCGGAAGAAGCTGCTGTACATCTTTAAGCAACCCTTCATGAGGCCTGTGC |
| | | AGACTACTCAAGAGGAGGACGGCTGTTCATGCCGGTTCCCAGAGGAGGAGGAA |
| | | GGCGGCTGCGAACTGCGCGTGAAATTCAGCCGCAGCGCAGATGCTCCAGCCTA |
| | | CAAGCAGGGGCAGAACCAGCTCTACAACGAACTCAATCTTGGTCGGAGAGAGG |
| | | AGTACGACGTGCTGGACAAGCGGAGAGGACGGGACCCAGAAATGGGCGGGAAG |
| | | CCGCGCAGAAAGAATCCCCAAGAGGGCCTGTACAACGAGCTCCAAAAGGATAA |
| | | GATGGCAGAAGCCTATAGCGAGATTGGTATGAAAGGGGAACGCAGAAGAGGCA |
| | | AAGGCCACGACGGACTGTACCAGGGACTCAGCACCGCCACCAAGGACACCTAT |
| | | GACGCTCTTCACATGCAGGCCCTGCCGCCTCGG |

BCMA_EBB-C1981-C3

| | | |
|---|---|---|
| BCMA_EBB- | 1171 | QVQLVESGGGLVQPGGSLRLSCAASGFTFSSYAMSWVRQAPGKGLEWVSAISG |
| C1981-C3- aa | | SGGSTYYADSVKGRFTISRDNSKNTLYLQMNSLRAEDTAVYYCAKVGYDSSGY |
| ScFv domain | | YRDYYGMDVWGQGTTVTVSSGGGGSGGGGSGGGGSEIVLTQSPGTLSLSPGER |
| | | ATLSCRASQSVSSSYLAWYQQKPGQAPRLLIYGTSSRATGISDRFSGSGSGTD |
| | | FTLTISRLEPEDFAVYYCQHYGNSPPKFTFGPGTKLEIK |
| BCMA_EBB- | 1172 | CAAGTGCAGCTCGTGGAGTCAGGCGGAGGACTGGTGCAGCCCGGGGGCTCCCT |
| C1981-C3- nt | | GAGACTTTCCTGCGCGGCATCGGGTTTTACCTTCTCCTCCTATGCTATGTCCT |
| ScFv domain | | GGGTGCGCCAGGCCCCGGGAAAGGGACTGGAATGGGTGTCCGCAATCAGCGGT |
| | | AGCGGGGGCTCAACATACTACGCCGACTCCGTCAAGGGTCGCTTCACTATTTC |
| | | CCGGGACAACTCCAAGAATACCCTGTACCTCCAAATGAACAGCCTCAGGGCCG |
| | | AGGATACTGCCGTGTACTACTGCGCCAAAGTCGGATACGATAGCTCCGGTTAC |
| | | TACCGGGACTACTACGGAATGGACGTGTGGGGACAGGGCACCACCGTGACCGT |
| | | GTCAAGCGGCGGAGGCGGTTCAGGAGGGGGAGGCTCCGGCGGTGGAGGGTCCG |
| | | AAATCGTCCTGACTCAGTCGCCTGGCACTCTGTCGTTGTCCCCGGGGGAGCGC |
| | | GCTACCCTGTCGTGTCGGGCGTCGCAGTCCGTGTCGAGCTCCTACCTCGCGTG |
| | | GTACCAGCAGAAGCCCGGACAGGCCCCTAGACTTCTGATCTACGGCACTTCTT |
| | | CACGCGCCACCGGGATCAGCGACAGGTTCAGCGGCTCCGGCTCCGGGACCGAC |
| | | TTCACCCTGACCATTAGCCGGCTGGAGCCTGAAGATTTCGCCGTGTATTACTG |
| | | CCAACACTACGGAAACTCGCCGCCAAAGTTCACGTTCGGACCCGGAACCAAGC |
| | | TGGAAATCAAG |
| BCMA_EBB- | 1173 | QVQLVESGGGLVQPGGSLRLSCAASGFTFSSYAMSWVRQAPGKGLEWVSAISG |
| C1981-C3- aa | | SGGSTYYADSVKGRFTISRDNSKNTLYLQMNSLRAEDTAVYYCAKVGYDSSGY |
| VH | | YRDYYGMDVWGQGTTVTVSS |
| BCMA_EBB- | 1174 | EIVLTQSPGTLSLSPGERATLSCRASQSVSSSYLAWYQQKPGQAPRLLIYGTS |
| C1981-C3- aa | | SRATGISDRFSGSGSGTDFTLTISRLEPEDFAVYYCQHYGNSPPKFTFGPGTK |
| VL | | LEIK |
| BCMA_EBB- | 1175 | MALPVTALLLPLALLLHAARPQVQLVESGGGLVQPGGSLRLSCAASGFTFSSY |
| C1981-C3- aa | | AMSWVRQAPGKGLEWVSAISGSGGSTYYADSVKGRFTISRDNSKNTLYLQMNS |
| Full CART | | LRAEDTAVYYCAKVGYDSSGYYRDYYGMDVWGQGTTVTVSSGGGGSGGGGSGG |
| | | GGSEIVLTQSPGTLSLSPGERATLSCRASQSVSSSYLAWYQQKPGQAPRLLIY |
| | | GTSSRATGISDRFSGSGSGTDFTLTISRLEPEDFAVYYCQHYGNSPPKFTFGP |
| | | GTKLEIKTTTPAPRPPTPAPTIASQPLSLRPEACRPAAGGAVHTRGLDFACDI |
| | | YIWAPLAGTCGVLLLSLVITLYCKRGRKKLLYIFKQPFMRPVQTTQEEDGCSC |
| | | RFPEEEEGGCELRVKFSRSADAPAYKQGQNQLYNELNLGRREEYDVLDKRRGR |
| | | DPEMGGKPRRKNPQEGLYNELQKDKMAEAYSEIGMKGERRRGKGHDGLYQGLS |
| | | TATKDTYDALHMQALPPR |
| BCMA_EBB- | 1176 | ATGGCCCTCCCTGTCACCGCCCTGCTGCTTCCGCTGGCTCTTCTGCTCCACGC |
| C1981-C3- nt | | CGCTCGGCCCCAAGTGCAGCTCGTGGAGTCAGGCGGAGGACTGGTGCAGCCCG |
| Full CART | | GGGGCTCCCTGAGACTTTCCTGCGCGGCATCGGGTTTTACCTTCTCCTCCTAT |
| | | GCTATGTCCTGGGTGCGCCAGGCCCCGGGAAAGGGACTGGAATGGGTGTCCGC |
| | | AATCAGCGGTAGCGGGGGCTCAACATACTACGCCGACTCCGTCAAGGGTCGCT |
| | | TCACTATTTCCCGGGACAACTCCAAGAATACCCTGTACCTCCAAATGAACAGC |
| | | CTCAGGGCCGAGGATACTGCCGTGTACTACTGCGCCAAAGTCGGATACGATAG |
| | | CTCCGGTTACTACCGGGACTACTACGGAATGGACGTGTGGGGACAGGGCACCA |
| | | CCGTGACCGTGTCAAGCGGCGGAGGCGGTTCAGGAGGGGGAGGCTCCGGCGGT |
| | | GGAGGGTCCGAAATCGTCCTGACTCAGTCGCCTGGCACTCTGTCGTTGTCCCC |
| | | GGGGGAGCGCGCTACCCTGTCGTGTCGGGCGTCGCAGTCCGTGTCGAGCTCCT |
| | | ACCTCGCGTGGTACCAGCAGAAGCCCGGACAGGCCCCTAGACTTCTGATCTAC |
| | | GGCACTTCTTCACGCGCCACCGGGATCAGCGACAGGTTCAGCGGCTCCGGCTC |
| | | CGGGACCGACTTCACCCTGACCATTAGCCGGCTGGAGCCTGAAGATTTCGCCG |
| | | TGTATTACTGCCAACACTACGGAAACTCGCCGCCAAAGTTCACGTTCGGACCC |
| | | GGAACCAAGCTGGAAATCAAGACCACTACCCCAGCACCGAGGCCACCCACCCC |
| | | GGCTCCTACCATCGCCTCCCAGCCTCTGTCCCTGCGTCCGGAGGCATGTAGAC |
| | | CCGCAGCTGGTGGGGCCGTGCATACCCGGGGTCTTGACTTCGCCTGCGATATC |
| | | TACATTTGGGCCCCTCTGGCTGGTACTTGCGGGGTCCTGCTGCTTTCACTCGT |
| | | GATCACTCTTTACTGTAAGCGCGGTCGGAAGAAGCTGCTGTACATCTTTAAGC |
| | | AACCCTTCATGAGGCCTGTGCAGACTACTCAAGAGGAGGACGGCTGTTCATGC |
| | | CGGTTCCCAGAGGAGGAGGAAGGCGGCTGCGAACTGCGCGTGAAATTCAGCCG |
| | | CAGCGCAGATGCTCCAGCCTACAAGCAGGGGCAGAACCAGCTCTACAACGAAC |
| | | TCAATCTTGGTCGGAGAGAGGAGTACGACGTGCTGGACAAGCGGAGAGGACGG |
| | | GACCCAGAAATGGGCGGGAAGCCGCGCAGAAAGAATCCCCAAGAGGGCCTGTA |
| | | CAACGAGCTCCAAAAGGATAAGATGGCAGAAGCCTATAGCGAGATTGGTATGA |
| | | AAGGGGAACGCAGAAGAGGCAAAGGCCACGACGGACTGTACCAGGGACTCAGC |
| | | ACCGCCACCAAGGACACCTATGACGCTCTTCACATGCAGGCCCTGCCGCCTCG |
| | | G |

BCMA_EBB-C1978-G4

| | | |
|---|---|---|
| BCMA_EBB- | 1177 | EVQLVESGGGLVQPGGSLRLSCAASGFTFSSYAMSWVRQAPGKGLEWVSAISG |
| C1978-G4- aa | | SGGSTYYADSVKGRFTISRDNSKNTLYLQMNSLRAEDTAVYYCAKMGWSSGYL |
| ScFv domain | | GAFDIWGQGTTVTVSSGGGGSGGGGSGGGGSEIVLTQSPGTLSLSPGERATLS |
| | | CRASQSVASSFLAWYQQKPGQAPRLLIYGASGRATGIPDRFSGSGSGTDFTLT |
| | | ISRLEPEDFAVYYCQHYGGSPRLTFGGGTKVDIK |
| BCMA_EBB- | 1178 | GAAGTCCAACTGGTGGAGTCCGGGGGAGGGCTCGTGCAGCCCGGAGGCAGCCT |
| C1978-G4- nt | | TCGGCTGTCGTGCGCCGCCTCCGGGTTCACGTTCTCATCCTACGCGATGTCGT |
| ScFv domain | | GGGTCAGACAGGCACCAGGAAAGGGACTGGAATGGGTGTCCGCCATTAGCGGC |
| | | TCCGGCGGTAGCACCTACTATGCCGACTCAGTGAAGGGAAGGTTCACTATCTC |
| | | CCGCGACAACAGCAAGAACACCCTGTACCTCCAAATGAACTCTCTGCGGGCCG |
| | | AGGATACCGCGGTGTACTATTGCGCCAAGATGGGTTGGTCCAGCGGATACTTG |
| | | GGAGCCTTCGACATTTGGGGACAGGGCACTACTGTGACCGTGTCCTCCGGGGG |
| | | TGGCGGATCGGGAGGCGGCGGCTCGGGTGGAGGGGGTTCCGAAATCGTGTTGA |
| | | CCCAGTCACCGGGAACCCTCTCGCTGTCCCCGGGAGAACGGGCTACACTGTCA |
| | | TGTAGAGCGTCCCAGTCCGTGGCTTCCTCGTTCCTGGCCTGGTACCAGCAGAA |
| | | GCCGGGACAGGCACCCCGCCTGCTCATCTACGGAGCCAGCGGCCGGGCGACCG |
| | | GCATCCCTGACCGCTTCTCCGGTTCCGGCTCGGGCACCGACTTTACTCTGACC |
| | | ATTAGCAGGCTTGAGCCCGAGGATTTTGCCGTGTACTACTGCCAACACTACGG |
| | | GGGGAGCCCTCGCCTGACCTTCGGAGGCGGAACTAAGGTCGATATCAAAA |
| BCMA_EBB- | 1179 | EVQLVESGGGLVQPGGSLRLSCAASGFTFSSYAMSWVRQAPGKGLEWVSAISG |
| C1978-G4- aa | | SGGSTYYADSVKGRFTISRDNSKNTLYLQMNSLRAEDTAVYYCAKMGWSSGYL |
| VH | | GAFDIWGQGTTVTVSS |
| BCMA_EBB- | 1180 | EIVLTQSPGTLSLSPGERATLSCRASQSVASSFLAWYQQKPGQAPRLLIYGAS |
| C1978-G4- aa | | GRATGIPDRFSGSGSGTDFTLTISRLEPEDFAVYYCQHYGGSPRLTFGGGTKV |
| VL | | DIK |
| BCMA_EBB- | 1181 | MALPVTALLLPLALLLHAARPEVQLVESGGGLVQPGGSLRLSCAASGFTFSSY |
| C1978-G4- aa | | AMSWVRQAPGKGLEWVSAISGSGGSTYYADSVKGRFTISRDNSKNTLYLQMNS |
| Full CART | | LRAEDTAVYYCAKMGWSSGYLGAFDIWGQGTTVTVSSGGGGSGGGGSGGGGSE |
| | | IVLTQSPGTLSLSPGERATLSCRASQSVASSFLAWYQQKPGQAPRLLIYGASG |
| | | RATGIPDRFSGSGSGTDFTLTISRLEPEDFAVYYCQHYGGSPRLTFGGGTKVD |
| | | IKTTTPAPRPPTPAPTIASQPLSLRPEACRPAAGGAVHTRGLDFACDIYIWAP |
| | | LAGTCGVLLLSLVITLYCKRGRKKLLYIFKQPFMRPVQTTQEEDGCSCRFPEE |
| | | EEGGCELRVKFSRSADAPAYKQGQNQLYNELNLGRREEYDVLDKRRGRDPEMG |
| | | GKPRRKNPQEGLYNELQKDKMAEAYSEIGMKGERRRGKGHDGLYQGLSTATKD |
| | | TYDALHMQALPPR |
| BCMA_EBB- | 1182 | ATGGCCCTCCCTGTCACCGCCCTGCTGCTTCCGCTGGCTCTTCTGCTCCACGC |
| C1978-G4- nt | | CGCTCGGCCCGAAGTCCAACTGGTGGAGTCCGGGGGAGGGCTCGTGCAGCCCG |
| Full CART | | GAGGCAGCCTTCGGCTGTCGTGCGCCGCCTCCGGGTTCACGTTCTCATCCTAC |
| | | GCGATGTCGTGGGTCAGACAGGCACCAGGAAAGGGACTGGAATGGGTGTCCGC |
| | | CATTAGCGGCTCCGGCGGTAGCACCTACTATGCCGACTCAGTGAAGGGAAGGT |
| | | TCACTATCTCCCGCGACAACAGCAAGAACACCCTGTACCTCCAAATGAACTCT |
| | | CTGCGGGCCGAGGATACCGCGGTGTACTATTGCGCCAAGATGGGTTGGTCCAG |
| | | CGGATACTTGGGAGCCTTCGACATTTGGGGACAGGGCACTACTGTGACCGTGT |
| | | CCTCCGGGGGTGGCGGATCGGGAGGCGGCGGCTCGGGTGGAGGGGGTTCCGAA |
| | | ATCGTGTTGACCCAGTCACCGGGAACCCTCTCGCTGTCCCCGGGAGAACGGGC |
| | | TACACTGTCATGTAGAGCGTCCCAGTCCGTGGCTTCCTCGTTCCTGGCCTGGT |
| | | ACCAGCAGAAGCCGGGACAGGCACCCCGCCTGCTCATCTACGGAGCCAGCGGC |
| | | CGGGCGACCGGCATCCCTGACCGCTTCTCCGGTTCCGGCTCGGGCACCGACTT |
| | | TACTCTGACCATTAGCAGGCTTGAGCCCGAGGATTTTGCCGTGTACTACTGCC |
| | | AACACTACGGGGGGAGCCCTCGCCTGACCTTCGGAGGCGGAACTAAGGTCGAT |
| | | ATCAAAACCACTACCCCAGCACCGAGGCCACCCACCCCGGCTCCTACCATCGC |
| | | CTCCCAGCCTCTGTCCCTGCGTCCGGAGGCATGTAGACCCGCAGCTGGTGGGG |
| | | CCGTGCATACCCGGGGTCTTGACTTCGCCTGCGATATCTACATTTGGGCCCCT |
| | | CTGGCTGGTACTTGCGGGGTCCTGCTGCTTTCACTCGTGATCACTCTTTACTG |
| | | TAAGCGCGGTCGGAAGAAGCTGCTGTACATCTTTAAGCAACCCTTCATGAGGC |
| | | CTGTGCAGACTACTCAAGAGGAGGACGGCTGTTCATGCCGGTTCCCAGAGGAG |
| | | GAGGAAGGCGGCTGCGAACTGCGCGTGAAATTCAGCCGCAGCGCAGATGCTCC |
| | | AGCCTACAAGCAGGGGCAGAACCAGCTCTACAACGAACTCAATCTTGGTCGGA |
| | | GAGAGGAGTACGACGTGCTGGACAAGCGGAGAGGACGGGACCCAGAAATGGGC |
| | | GGGAAGCCGCGCAGAAAGAATCCCCAAGAGGGCCTGTACAACGAGCTCCAAAA |
| | | GGATAAGATGGCAGAAGCCTATAGCGAGATTGGTATGAAAGGGGAACGCAGAA |
| | | GAGGCAAAGGCCACGACGGACTGTACCAGGGACTCAGCACCGCCACCAAGGAC |
| | | ACCTATGACGCTCTTCACATGCAGGCCCTGCCGCCTCGG |

TABLE 6
Additional exemplary BCMA CAR sequences

| | | SEQ |
|---|---|---|
| | | ID |
| Name | Sequence | NO: |
| A7D12.2 | QIQLVQSGPDLKKPGETVKLSCKASGYTFTNFGMNWVKQAPGKGFKWMAWINTYTGE | 1183 |
| VH | SYFADDFKGRFAFSVETSATTAYLQINNLKTEDTATYFCARGEIYYGYDGGFAYWGQ | |
| | GTLVTVSA | |
| A7D12.2 | DVVMTQSHRFMSTSVGDRVSITCRASQDVNTAVSWYQQKPGQSPKLLIFSASYRYTG | 1184 |
| VL | VPDRFTGSGSGADFTLTISSVQAEDLAVYYCQQHYSTPWTFGGGTKLDIK | |
| A7D12.2 | QIQLVQSGPDLKKPGETVKLSCKASGYTFTNFGMNWVKQAPGKGFKWMAWINTYTGE | 1185 |
| scFv | SYFADDFKGRFAFSVETSATTAYLQINNLKTEDTATYFCARGEIYYGYDGGFAYWGQ | |
| domain | GTLVTVSAGGGGSGGGGSGGGGSDVVMTQSHRFMSTSVGDRVSITCRASQDVNTAVS | |
| | WYQQKPGQSPKLLIFSASYRYTGVPDRFTGSGSGADFTLTISSVQAEDLAVYYCQQH | |
| | YSTPWTFGGGTKLDIK | |
| A7D12.2 | QIQLVQSGPDLKKPGETVKLSCKASGYTFTNFGMNWVKQAPGKGFKWMAWINTYTGE | 1186 |
| Full | SYFADDFKGRFAFSVETSATTAYLQINNLKTEDTATYFCARGEIYYGYDGGFAYWGQ | |
| CART | GTLVTVSAGGGGSGGGGSGGGGSDVVMTQSHRFMSTSVGDRVSITCRASQDVNTAVS | |
| | WYQQKPGQSPKLLIFSASYRYTGVPDRFTGSGSGADFTLTISSVQAEDLAVYYCQQH | |
| | YSTPWTFGGGTKLDIKTTTPAPRPPTPAPTIASQPLSLRPEACRPAAGGAVHTRGLD | |
| | FACDIYIWAPLAGTCGVLLLSLVITLYCKRGRKKLLYIFKQPFMRPVQTTQEEDGCS | |
| | CRFPEEEEGGCELRVKFSRSADAPAYKQGQNQLYNELNLGRREEYDVLDKRRGRDPE | |
| | MGGKPRRKNPQEGLYNELQKDKMAEAYSEIGMKGERRRGKGHDGLYQGLSTATKDTY | |
| | DALHMQALPPR | |
| C11D5.3 | QIQLVQSGPELKKPGETVKISCKASGYTFTDYSINWVKRAPGKGLKWMGWINTETRE | 1187 |
| VH | PAYAYDFRGRFAFSLETSASTAYLQINNLKYEDTATYFCALDYSYAMDYWGQGTSVT | |
| | VSS | |
| C11D5.3 | DIVLTQSPASLAMSLGKRATISCRASESVSVIGAHLIHWYQQKPGQPPKLLIYLASN | 1188 |
| VL | LETGVPARFSGSGSGTDFTLTIDPVEEDDVAIYSCLQSRIFPRTFGGGTKLEIK | |
| C11D5.3 | QIQLVQSGPELKKPGETVKISCKASGYTFTDYSINWVKRAPGKGLKWMGWINTETRE | 1189 |
| scFv | PAYAYDFRGRFAFSLETSASTAYLQINNLKYEDTATYFCALDYSYAMDYWGQGTSVT | |
| domain | VSSGGGGSGGGGSGGGGSQIQLVQSGPELKKPGETVKISCKASGYTFTDYSINWVKR | |
| | APGKGLKWMGWINTETREPAYAYDFRGRFAFSLETSASTAYLQINNLKYEDTATYFC | |
| | ALDYSYAMDYWGQGTSVTVSS | |
| C11D5.3 | QIQLVQSGPELKKPGETVKISCKASGYTFTDYSINWVKRAPGKGLKWMGWINTETRE | 1190 |
| Full | PAYAYDFRGRFAFSLETSASTAYLQINNLKYEDTATYFCALDYSYAMDYWGQGTSVT | |
| CART | VSSGGGGSGGGGSGGGGSQIQLVQSGPELKKPGETVKISCKASGYTFTDYSINWVKR | |
| | APGKGLKWMGWINTETREPAYAYDFRGRFAFSLETSASTAYLQINNLKYEDTATYFC | |
| | ALDYSYAMDYWGQGTSVTVSSTTTPAPRPPTPAPTIASQPLSLRPEACRPAAGGAVH | |
| | TRGLDFACDIYIWAPLAGTCGVLLLSLVITLYCKRGRKKLLYIFKQPFMRPVQTTQE | |
| | EDGCSCRFPEEEEGGCELRVKFSRSADAPAYKQGQNQLYNELNLGRREEYDVLDKRR | |
| | GRDPEMGGKPRRKNPQEGLYNELQKDKMAEAYSEIGMKGERRRGKGHDGLYQGLSTA | |
| | TKDTYDALHMQALPPR | |
| C12A3.2 | QIQLVQSGPELKKPGETVKISCKASGYTFRHYSMNWVKQAPGKGLKWMGRINTESGV | 1191 |
| VH | PIYADDFKGRFAFSVETSASTAYLVINNLKDEDTASYFCSNDYLYSLDFWGQGTALT | |
| | VSS | |
| C12A3.2 | DIVLTQSPPSLAMSLGKRATISCRASESVTILGSHLIYWYQQKPGQPPTLLIQLASN | 1192 |
| VL | VQTGVPARFSGSGSRTDFTLTIDPVEEDDVAVYYCLQSRTIPRTFGGGTKLEIK | |
| C12A3.2 | QIQLVQSGPELKKPGETVKISCKASGYTFRHYSMNWVKQAPGKGLKWMGRINTESGV | 1193 |
| scFv | PIYADDFKGRFAFSVETSASTAYLVINNLKDEDTASYFCSNDYLYSLDFWGQGTALT | |
| domain | VSSGGGGSGGGGSGGGGSDIVLTQSPPSLAMSLGKRATISCRASESVTILGSHLIYW | |
| | YQQKPGQPPTLLIQLASNVQTGVPARFSGSGSRTDFTLTIDPVEEDDVAVYYCLQSR | |
| | TIPRTFGGGTKLEIK | |
| C12A3.2 | QIQLVQSGPELKKPGETVKISCKASGYTFRHYSMNWVKQAPGKGLKWMGRINTESGV | 1194 |
| Full | PIYADDFKGRFAFSVETSASTAYLVINNLKDEDTASYFCSNDYLYSLDFWGQGTALT | |
| CART | VSSGGGGSGGGGSGGGGSDIVLTQSPPSLAMSLGKRATISCRASESVTILGSHLIYW | |
| | YQQKPGQPPTLLIQLASNVQTGVPARFSGSGSRTDFTLTIDPVEEDDVAVYYCLQSR | |
| | TIPRTFGGGTKLEIKTTTPAPRPPTPAPTIASQPLSLRPEACRPAAGGAVHTRGLDF | |
| | ACDIYIWAPLAGTCGVLLLSLVITLYCKRGRKKLLYIFKQPFMRPVQTTQEEDGCSC | |
| | RFPEEEEGGCELRVKFSRSADAPAYKQGQNQLYNELNLGRREEYDVLDKRRGRDPEM | |
| | GGKPRRKNPQEGLYNELQKDKMAEAYSEIGMKGERRRGKGHDGLYQGLSTATKDTYD | |
| | ALHMQALPPR | |
| C13F12.1 | QIQLVQSGPELKKPGETVKISCKASGYTFTHYSMNWVKQAPGKGLKWMGRINTETGE | 1195 |
| VH | PLYADDFKGRFAFSLETSASTAYLVINNLKNEDTATFFCSNDYLYSCDYWGQGTTLT | |
| | VSS | |
| C13F12.1 | DIVLTQSPPSLAMSLGKRATISCRASESVTILGSHLIYWYQQKPGQPPTLLIQLASN | 1196 |
| VL | VQTGVPARFSGSGSRTDFTLTIDPVEEDDVAVYYCLQSRTIPRTFGGGTKLEIK | |
| C13F12.1 | QIQLVQSGPELKKPGETVKISCKASGYTFTHYSMNWVKQAPGKGLKWMGRINTETGE | 1197 |
| scFv | PLYADDFKGRFAFSLETSASTAYLVINNLKNEDTATFFCSNDYLYSCDYWGQGTTLT | |
| domain | VSSGGGGSGGGGSGGGGSDIVLTQSPPSLAMSLGKRATISCRASESVTILGSHLIYW | |
| | YQQKPGQPPTLLIQLASNVQTGVPARFSGSGSRTDFTLTIDPVEEDDVAVYYCLQSR | |
| | TIPRTFGGGTKLEIK | |
| C13F12.1 | QIQLVQSGPELKKPGETVKISCKASGYTFTHYSMNWVKQAPGKGLKWMGRINTETGE | 1198 |
| Full | PLYADDFKGRFAFSLETSASTAYLVINNLKNEDTATFFCSNDYLYSCDYWGQGTTLT | |
| CART | VSSGGGGSGGGGSGGGGSDIVLTQSPPSLAMSLGKRATISCRASESVTILGSHLIYW | |
| | YQQKPGQPPTLLIQLASNVQTGVPARFSGSGSRTDFTLTIDPVEEDDVAVYYCLQSR | |
| | TIPRTFGGGTKLEIKTTTPAPRPPTPAPTIASQPLSLRPEACRPAAGGAVHTRGLDF | |
| | ACDIYIWAPLAGTCGVLLLSLVITLYCKRGRKKLLYIFKQPFMRPVQTTQEEDGCSC | |
| | RFPEEEEGGCELRVKFSRSADAPAYKQGQNQLYNELNLGRREEYDVLDKRRGRDPEM | |
| | GGKPRRKNPQEGLYNELQKDKMAEAYSEIGMKGERRRGKGHDGLYQGLSTATKDTYD | |
| | ALHMQALPPR | |

[0704] Exemplary BCMA CAR constructs disclose herein comprise an scFv (e.g., a scFv as disclosed in Table 5 or 6, optionally preceded with an optional leader sequence (e.g., SEQ ID NO: 2 and SEQ ID NO: 3 or 1938 for exemplary leader amino acid and nucleotide sequences, respectively). The sequences of the scFv fragments (e.g., an ScFv from any of SEQ ID NOs: 967-1182, e.g., SEQ ID NOs: 967, 973, 979, 985, 991, 997, 1003, 1009, 1015, 1021, 1027, 1033, 1039, 1045, 1051, 1057, 1063, 1069, 1075, 1081, 1087, 1093, 1099, 1105, 1111, 1117, 1123, 1129, 1135, 1141, 1147, 1153, 1159, 1165, 1171, 1177, not including the optional leader sequence) are provided herein in Tables 5 or 6. The BCMA CAR construct can further include an optional hinge domain, e.g., a CD8 hinge domain (e.g., including the amino acid sequence of SEQ ID NO: 403 or encoded by a nucleic acid sequence of SEQ ID NO: 404); a transmembrane domain, e.g., a CD8 transmembrane domain (e.g., including the amino acid sequence of SEQ ID NO: 12 or encoded by the nucleotide sequence of SEQ ID NO: 13 or 1939); an intracellular domain, e.g., a 4-1BB intracellular domain (e.g., including the amino acid sequence of SEQ ID NO: 14 or encoded by the nucleotide sequence of SEQ ID NO: 15 or 1940; and a functional signaling domain, e.g., a CD3 zeta domain (e.g., including amino acid sequence of SEQ ID NO: 18 or 20, or encoded by the nucleotide sequence of SEQ ID NO: 19, 1941, or 21). In certain embodiments, the domains are contiguous with and in the same reading frame to form a single fusion protein. In other embodiments, the domain are in separate polypeptides, e.g., as in an RCAR molecule as described herein.

[0705] In certain embodiments, the full length BCMA CAR molecule includes the amino acid sequence of, or is encoded by the nucleotide sequence of, BCMA-1, BCMA-2, BCMA-3, BCMA-4, BCMA-5, BCMA-6, BCMA-7, BCMA-8, BCMA-9, BCMA-10, BCMA-11, BCMA-12, BCMA-13, BCMA-14, BCMA-15, 149362, 149363, 149364, 149365, 149366, 149367, 149368, 149369, BCMA_EBB-C1978-A4, BCMA_EBB-C1978-G1, BCMA_EBB-C1979-C1, BCMA_EBB-C1978-C7, BCMA_EBB-C1978-D10, BCMA_EBB-C1979-C12, BCMA_EBB-C1980-G4, BCMA_EBB-C1980-D2, BCMA_EBB-C1978-A10, BCMA_EBB-C1978-D4, BCMA_EBB-C1980-A2, BCMA_EBB-C1981-C3, BCMA_EBB-C1978-G4, A7D12.2, C11D5.3, C12A3.2, or C13F12.1 provided in Table 5 or 6, or a sequence substantially (e.g., 85%, 95-99% or higher) identical thereto.

[0706] In certain embodiments, the BCMA CAR molecule, or the anti-BCMA antigen binding domain, includes the scFv amino acid sequence of BCMA-1, BCMA-2, BCMA-3, BCMA-4, BCMA-5, BCMA-6, BCMA-7, BCMA-8, BCMA-9, BCMA-10, BCMA-11, BCMA-12, BCMA-13, BCMA-14, BCMA-15, 149362, 149363, 149364, 149365, 149366, 149367, 149368, 149369, BCMA_EBB-C1978-A4, BCMA_EBB-C1978-G1, BCMA_EBB-C1979-C1, BCMA_EBB-C1978-C7, BCMA_EBB-C1978-D10, BCMA_EBB-C1979-C12, BCMA_EBB-C1980-G4, BCMA_EBB-C1980-D2, BCMA_EBB-C1978-A10, BCMA_EBB-C1978-D4, BCMA_EBB-C1980-A2, BCMA_EBB-C1981-C3, BCMA_EBB-C1978-G4, A7D12.2, C11D5.3, C12A3.2, or C13F12.1 provided in Table 5 or 6 (with or without the leader sequence), or a sequence substantially identical (e.g., 85%, 95-99% or higher identical, or up to 20, 15, 10, 8, 6, 5, 4, 3, 2, or 1 amino acid changes, e.g., substitutions (e.g., conservative substitutions)) to any of the aforesaid sequences.

[0707] In certain embodiments, the BCMA CAR molecule, or the anti-BCMA antigen binding domain, includes the heavy chain variable region and/or the light chain variable region of BCMA-1, BCMA-2, BCMA-3, BCMA-4, BCMA-5, BCMA-6, BCMA-7, BCMA-8, BCMA-9, BCMA-10, BCMA-11, BCMA-12, BCMA-13, BCMA-14, BCMA-15, 149362, 149363, 149364, 149365, 149366, 149367, 149368, 149369, BCMA_EBB-C1978-A4, BCMA_EBB-C1978-G1, BCMA_EBB-C1979-C1, BCMA_EBB-C1978-C7, BCMA_EBB-C1978-D10, BCMA_EBB-C1979-C12, BCMA_EBB-C1980-G4, BCMA_EBB-C1980-D2, BCMA_EBB-C1978-A10, BCMA_EBB-C1978-D4, BCMA_EBB-C1980-A2, BCMA_EBB-C1981-C3, BCMA_EBB-C1978-G4, A7D12.2, C11D5.3, C12A3.2, or C13F12.1 provided in Table 5 or 6, or a sequence substantially identical (e.g., 85%, 95-99% or higher identical, or up to 20, 15, 10, 8, 6, 5, 4, 3, 2, or 1 amino acid changes, e.g., substitutions (e.g., conservative substitutions)) to any of the aforesaid sequences.

[0708] In certain embodiments, the BCMA CAR molecule, or the anti-BCMA antigen binding domain, includes one, two or three CDRs from the heavy chain variable region (e.g., HCDR1, HCDR2 and/or HCDR3), provided in Table 7; and/or one, two or three CDRs from the light chain variable region (e.g., LCDR1, LCDR2 and/or LCDR3) of BCMA-1, BCMA-2, BCMA-3, BCMA-4, BCMA-5, BCMA-6, BCMA-7, BCMA-8, BCMA-9, BCMA-10, BCMA-11, BCMA-12, BCMA-13, BCMA-14, BCMA-15, 149362, 149363, 149364, 149365, 149366, 149367, 149368, 149369, BCMA_EBB-C1978-A4, BCMA_EBB-C1978-G1, BCMA_EBB-C1979-C1, BCMA_EBB-C1978-C7, BCMA_EBB-C1978-D10, BCMA_EBB-C1979-C12, BCMA_EBB-C1980-G4, BCMA_EBB-C1980-D2, BCMA_EBB-C1978-A10, BCMA_EBB-C1978-D4, BCMA_EBB-C1980-A2, BCMA_EBB-C1981-C3, BCMA_EBB-C1978-G4, A7D12.2, C11D5.3, C12A3.2, or C13F12.1, provided in Table 8; or a sequence substantially identical (e.g., 85%, 95-99% or higher identical, or up to 20, 15, 10, 8, 6, 5, 4, 3, 2, or 1 amino acid changes, e.g., substitutions (e.g., conservative substitutions)) to any of the aforesaid sequences.

[0709] In certain embodiments, the BCMA CAR molecule, or the anti-BCMA antigen binding domain, includes one, two or three CDRs from the heavy chain variable region (e.g., HCDR1, HCDR2 and/or HCDR3), provided in Table 9; and/or one, two or three CDRs from the light chain variable region (e.g., LCDR1, LCDR2 and/or LCDR3) of BCMA-1, BCMA-2, BCMA-3, BCMA-4, BCMA-5, BCMA-6, BCMA-7, BCMA-8, BCMA-9, BCMA-10, BCMA-11, BCMA-12, BCMA-13, BCMA-14, BCMA-15, 149362, 149363, 149364, 149365, 149366, 149367, 149368, 149369, BCMA_EBB-C1978-A4, BCMA_EBB-C1978-G1, BCMA_EBB-C1979-C1, BCMA_EBB-C1978-C7, BCMA_EBB-C1978-D10, BCMA_EBB-C1979-C12, BCMA_EBB-C1980-G4, BCMA_EBB-C1980-D2, BCMA_EBB-C1978-A10, BCMA_EBB-C1978-D4, BCMA_EBB-C1980-A2, BCMA_EBB-C1981-C3, BCMA_EBB-C1978-G4, A7D12.2, C11D5.3, C12A3.2, or C13F12.1, provided in Table 10; or a sequence substantially identical (e.g., 85%, 95-99% or higher identical, or up to 20, 15, 10, 8, 6, 5, 4, 3, 2, or 1 amino acid changes, e.g., substitutions (e.g., conservative substitutions)) to any of the aforesaid sequences.

[0710] In certain embodiments, the BCMA CAR molecule, or the anti-BCMA antigen binding domain, includes one, two or three CDRs from the heavy chain variable region (e.g., HCDR1, HCDR2 and/or HCDR3), provided in Table 11; and/or one, two or three CDRs from the light chain variable region (e.g., LCDR1, LCDR2 and/or LCDR3) of BCMA-1, BCMA-2, BCMA-3, BCMA-4, BCMA-5, BCMA-6, BCMA-7, BCMA-8, BCMA-9, BCMA-10, BCMA-11, BCMA-12, BCMA-13, BCMA-14, BCMA-15, 149362, 149363, 149364, 149365, 149366, 149367, 149368, 149369, BCMA_EBB-C1978-A4, BCMA_EBB-C1978-G1, BCMA_EBB-C1979-C1, BCMA_EBB-C1978-C7, BCMA_EBB-C1978-D10, BCMA_EBB-C1979-C12, BCMA_EBB-C1980-G4, BCMA_EBB-C1980-D2, BCMA_EBB-C1978-A10, BCMA_EBB-C1978-D4, BCMA_EBB-C1980-A2, BCMA_EBB-C1981-C3, BCMA_EBB-C1978-G4, A7D12.2, C11D5.3, C12A3.2, or C13F12.1, provided in Table 12; or a sequence substantially identical (e.g., 85%, 95-99% or higher identical, or up to 20, 15, 10, 8, 6, 5, 4, 3, 2, or 1 amino acid changes, e.g., substitutions (e.g., conservative substitutions)) to any of the aforesaid sequences.

[0711] The sequences of human CDR sequences of the scFv domains are shown in Tables 7, 9, and 11 for the heavy chain variable domains and in Tables 8, 10, and 12 for the light chain variable domains. “ID” stands for the respective SEQ ID NO for each CDR.

TABLE 7
Heavy Chain Variable Domain CDRs according to the
Kabat numbering scheme (Rabat et al. (1991),
“Sequences of Proteins of Immunological Interest,”
5th Ed. Public Health Service, National Institutes of
Health, Bethesda, MD)

| Candidate | HCDR1 | ID | HCDR2 | ID | HCDR3 | ID |
|---|---|---|---|---|---|---|
| 139109 | NHGMS | 1199 | GIVYSGSTYYAASVKG | 1239 | HGGESDV | 1279 |
| 139103 | NYAMS | 1200 | GISRSGENTYYADSVKG | 1240 | SPAHYYGGMDV | 1280 |
| 139105 | DYAMH | 1201 | GISWNSGSIGYADSVKG | 1241 | HSFLAY | 1281 |
| 139111 | NHGMS | 1202 | GIVYSGSTYYAASVKG | 1242 | HGGESDV | 1282 |
| 139100 | NFGIN | 1203 | WINPKNNNTNYAQKFQG | 1243 | GPYYYQSYMDV | 1283 |
| 139101 | SDAMT | 1204 | VISGSGGTTYYADSVKG | 1244 | LDSSGYYYARGPR | 1284 |
| | | | | | Y | |
| 139102 | NYGIT | 1205 | WISAYNGNTNYAQKFOG | 1245 | GPYYYYMDV | 1285 |
| 139104 | NHGMS | 1206 | GIVYSGSTYYAASVKG | 1246 | HGGESDV | 1286 |
| 139106 | NHGMS | 1207 | GIVYSGSTYYAASVKG | 1247 | HGGESDV | 1287 |
| 139107 | NHGMS | 1208 | GIVYSGSTYYAASVKG | 1248 | HGGESDV | 1288 |
| 139108 | DYYMS | 1209 | YISSSGSTIYYADSVKG | 1249 | ESGDGMDV | 1289 |
| 139110 | DYYMS | 1210 | YISSSGNTIYYADSVKG | 1250 | STMVREDY | 1290 |
| 139112 | NHGMS | 1211 | GIVYSGSTYYAASVKG | 1251 | HGGESDV | 1291 |
| 139113 | NHGMS | 1212 | GIVYSGSTYYAASVKG | 1252 | HGGESDV | 1292 |
| 139114 | NHGMS | 1213 | GIVYSGSTYYAASVKG | 1253 | HGGESDV | 1293 |
| 149362 | SSYYYWG | 1214 | SIYYSGSAYYNPSLKS | 1254 | HWQEWPDAFDI | 1294 |
| 149363 | TSGMCVS | 1215 | RIDWDEDKEYSTSLKT | 1255 | SGAGGTSATAFDI | 1295 |
| 149364 | SYSMN | 1216 | SISSSSSYIYYADSVKG | 1256 | TIAAVYAFDI | 1296 |
| 149365 | DYYMS | 1217 | YISSSGSTIYYADSVKG | 1257 | DLRGAFDI | 1297 |
| 149366 | SHYIH | 1218 | MINPSGGVTAYSQTLQG | 1258 | EGSGSGWYFDF | 1298 |
| 149367 | SGGYYWS | 1219 | YIYYSGSTYYNPSLKS | 1259 | AGIAARLRGAFDI | 1299 |
| 149368 | SYAIS | 1220 | GIIPIFGTANYAQKFQG | 1260 | RGGYQLLRWDVGL | 1300 |
| | | | | | LRSAFDI | |
| 149369 | SNSAAWN | 1221 | RTYYRSKWYSFYAISLK | 1261 | SSPEGLFLYWFDP | 1301 |
| | | | S | | | |
| BCMA_EBB- | SYAMS | 1222 | AISGSGGSTYYADSVKG | 1262 | VEGSGSLDY | 1302 |
| C1978-A4 | | | | | | |
| BCMA_EBB- | RYFMS | 1223 | GISDSGVSTYYADSAKG | 1263 | RAGSEASDl | 1303 |
| C1978-G1 | | | | | | |
| BCMA_EBB- | SYAMS | 1224 | AISGSGGSTYYADSVKG | 1264 | ATYKRELRYYYGM | 1304 |
| C1979-C1 | | | | | DV | |
| BCMA_EBB- | SYAMS | 1225 | AISGSGGSTYYADSVKG | 1265 | ATYKRELRYYYGM | 1305 |
| C1978-C7 | | | | | DV | |
| BCMA_EBB- | DYAMH | 1226 | GISWNSGSIGYADSVKG | 1266 | VGKAVPDV | 1306 |
| C1978-D10 | | | | | | |
| BCMA_EBB- | DYAMH | 1227 | SINWKGNSLAYGDSVKG | 1267 | HQGVAYYNYAMDV | 1307 |
| C1979-C12 | | | | | | |
| BCMA_EBB- | SYAMS | 1228 | AISGSGGSTYYADSVKG | 1268 | VVRDGMDV | 1308 |
| C1980-G4 | | | | | | |
| BCMA_EBB- | SYAMS | 1229 | AISGSGGSTYYADSVKG | 1269 | IPQTGTFDY | 1309 |
| C1980-D2 | | | | | | |
| BCMA_EBB- | SYAMS | 1230 | AISGSGGSTYYADSVKG | 1270 | ANYKRELRYYYGM | 1310 |
| C1978-A10 | | | | | DV | |
| BCMA_EBB- | SYAMS | 1231 | AISGSGGSTYYADSVKG | 1271 | ALVGATGAFDI | 1311 |
| C1978-D4 | | | | | | |
| BCMA_EBB- | SYAMS | 1232 | AISGSGGSTYYADSVKG | 1272 | WFGEGFDP | 1312 |
| C1980-A2 | | | | | | |
| BCMA_EBB- | SYAMS | 1233 | AISGSGGSTYYADSVKG | 1273 | VGYDSSGYYRDYY | 1313 |
| C1981-C3 | | | | | GMDV | |
| BCMA_EBB- | SYAMS | 1234 | AISGSGGSTYYADSVKG | 1274 | MGWSSGYLGAFDI | 1314 |
| C1978-G4 | | | | | | |
| A7D12.2 | NFGMN | 1235 | WINTYTGESYFADDFKG | 1275 | GEIYYGYDGGFAY | 1315 |
| C11D5.3 | DYSIN | 1236 | WINTETREPAYAYDFRG | 1276 | DYSYAMDY | 1316 |
| C12A3.2 | HYSMN | 1237 | RINTESGVPIYADDFKG | 1277 | DYLYSLDF | 1317 |
| C13F12.1 | HYSMN | 1238 | RINTETGEPLYADDFKG | 1278 | DYLYSCDY | 1318 |

TABLE 8
Light Chain Variable Domain CDRs according to the
Kabat numbering scheme (Kabat et al. (1991),
“Sequences of Proteins of Immunological Interest,”
5th Ed. Public Health Service, National Institutes
of Health, Bethesda, MD)

| Candidate | LCDR1 | ID | LCDR2 | ID | LCDR3 | ID |
|---|---|---|---|---|---|---|
| 139109 | RASQSISSYLN | 1319 | AASSLQS | 1359 | QQSYSTPYT | 1399 |
| 139103 | RASQSISSSFLA | 1320 | GASRRAT | 1360 | QQYHSSPSWT | 1400 |
| 139105 | RSSQSLLHSNGYNYLD | 1321 | LGSNRAS | 1361 | MQALQTPYT | 1401 |
| 139111 | KSSQSLLRNDGKTPLY | 1322 | EVSNRFS | 1362 | MQNIQFPS | 1402 |
| 139100 | RSSQSLLHSNGYNYLN | 1323 | LGSKRAS | 1363 | MQALQTPYT | 1403 |
| 139101 | RASQSISSYLN | 1324 | GASTLAS | 1364 | QQSYKRAS | 1404 |
| 139102 | RSSQSLLYSNGYNYVD | 1325 | LGSNRAS | 1365 | MQGRQFPYS | 1405 |
| 139104 | RASQSVSSNLA | 1326 | GASTRAS | 1366 | QQYGSSLT | 1406 |
| 139106 | RASQSVSSKLA | 1327 | GASIRAT | 1367 | QQYGSSSWT | 1407 |
| 139107 | RASQSVGSTNLA | 1328 | DASNRAT | 1368 | QQYGSSPPWT | 1408 |
| 139108 | RASQSISSYLN | 1329 | AASSLQS | 1369 | QQSYTLA | 1409 |
| 139110 | KSSESLVHNSGKTYLN | 1330 | EVSNRDS | 1370 | MQGTHWPGT | 1410 |
| 139112 | QASEDINKFLN | 1331 | DASTLQT | 1371 | QQYESLPLT | 1411 |
| 139113 | RASQSVGSNLA | 1332 | GASTRAT | 1372 | QQYNDWLPVT | 1412 |
| 139114 | RASQSIGSSSLA | 1333 | GASSRAS | 1373 | QQYAGSPPFT | 1413 |
| 149362 | KASQDIDDAMN | 1334 | SATSPVP | 1374 | LQHDNFPLT | 1414 |
| 149363 | RASQDIYNNLA | 1335 | AANKSQS | 1375 | QHYYRFPYS | 1415 |
| 149364 | RSSQSLLHSNGYNYLD | 1336 | LGSNRAS | 1376 | MQALQTPYT | 1416 |
| 149365 | GGNNIGTKSVH | 1337 | DDSVRPS | 1377 | QVWDSDSEHV | 1417 |
| | | | | | V | |
| 149366 | SGDGLSKKYVS | 1338 | RDKERPS | 1378 | QAWDDTTVV | 1418 |
| 149367 | RASQGIRNWLA | 1339 | AASNLQS | 1379 | QKYNSAPFT | 1419 |
| 149368 | GGNNIGSKSVH | 1340 | GKNNRPS | 1380 | SSRDSSGDHLR | 1420 |
| | | | | | V | |
| 149369 | QGDSLGNYYAT | 1341 | GTNNRPS | 1381 | NSRDSSGHHLL | 1421 |
| BCMA_EB | RASQSVSSAYLA | 1342 | GASTRAT | 1382 | QHYGSSFNGSS | 1422 |
| B-C1978- | | | | | LFT | |
| A4 | | | | | | |
| BCMA_EB | RASQSVSNSLA | 1343 | DASSRAT | 1383 | QQFGTSSGLT | 1423 |
| B-C1978- | | | | | | |
| G1 | | | | | | |
| BCMA_EB | RASQSVSSSFLA | 1344 | GASSRAT | 1384 | QQYHSSPSWT | 1424 |
| B-C1979- | | | | | | |
| C1 | | | | | | |
| BCMA_EB | RASQSVSTTFLA | 1345 | GSSNRAT | 1385 | QQYHSSPSWT | 1425 |
| B-C1978- | | | | | | |
| C7 | | | | | | |
| BCMA_EB | RASQSISSYLN | 1346 | AASSLQS | 1386 | QQSYSTPYS | 1426 |
| B-C1978- | | | | | | |
| D10 | | | | | | |
| BCMA_EB | RATQSIGSSFLA | 1347 | GASQRAT | 1387 | QHYESSPSWT | 1427 |
| B-C1979- | | | | | | |
| C12 | | | | | | |
| BCMA_EB | RASQSVSSSYLA | 1348 | GASSRAT | 1388 | QQYGSPPRFT | 1428 |
| B-C1980- | | | | | | |
| G4 | | | | | | |
| BCMA_EB | RASQSVSSSYLA | 1349 | GASSRAT | 1389 | QHYGSSPSWT | 1429 |
| B-C1980- | | | | | | |
| D2 | | | | | | |
| BCMA_EB | RASQRVASNYLA | 1350 | GASSRAT | 1390 | QHYDSSPSWT | 1430 |
| B-C1978- | | | | | | |
| A10 | | | | | | |
| BCMA_EB | RASQSLSSNFLA | 1351 | GASNVVAT | 1391 | QYYGTSPMYT | 1431 |
| B-C1978- | | | | | | |
| D4 | | | | | | |
| BCMA_EB | RSSQSLLHSNGYNYLD | 1352 | LGSNRAS | 1392 | MQALQTPLT | 1432 |
| B-C1980- | | | | | | |
| A2 | | | | | | |
| BCMA_EB | RASQSVSSSYLA | 1353 | GTSSRAT | 1393 | QHYGNSPPKFT | 1433 |
| B-C1981- | | | | | | |
| C3 | | | | | | |
| BCMA_EB | RASQSVASSFLA | 1354 | GASGRAT | 1394 | QHYGGSPRLT | 1434 |
| B-C1978- | | | | | | |
| G4 | | | | | | |
| A7D12.2 | RASQDVNTAVS | 1355 | SASYRYT | 1395 | QQHYSTPWT | 1435 |
| C11D5.3 | RASESVSVIGAHLIH | 1356 | LASNLET | 1396 | LQSRIFPRT | 1436 |
| C12A3.2 | RASESVTILGSHLIY | 1357 | LASNVQT | 1397 | LQSRTIPRT | 1437 |
| C13F12.1 | RASESVTILGSHLIY | 1358 | LASNVQT | 1398 | LQSRTIPRT | 1438 |

TABLE 9
Heavy Chain Variable Domain CDRs according
to the Chothia numbering scheme
(A1-Lazikani et al., (1997) JMB 273,927-948)

| Candidate | HCDR1 | ID | HCDR2 | ID | HCDR3 | ID |
|---|---|---|---|---|---|---|
| 139109 | GFALSNH | 1439 | VYSGS | 1479 | HGGESDV | 1519 |
| 139103 | GFTFSNY | 1440 | SRSGEN | 1480 | SPAHYYG | 1520 |
| | | | | | GMDV | |
| 139105 | GFTFDDY | 1441 | SWNSGS | 1481 | HSFLAY | 1521 |
| 139111 | GFALSNH | 1442 | VYSGS | 1482 | HGGESDV | 1522 |
| 139100 | GYIFDNF | 1443 | NPKNNN | 1483 | GPYYYQS | 1523 |
| | | | | | YMDV | |
| 139101 | GFTFSSD | 1444 | SGSGGT | 1484 | LDSSGYY | 1524 |
| | | | | | YARGPRY | |
| 139102 | GYTFSNY | 1445 | SAYNGN | 1485 | GPYYYYM | 1525 |
| | | | | | DV | |
| 139104 | GFALSNH | 1446 | VYSGS | 1486 | HGGESDV | 1526 |
| 139106 | GFALSNH | 1447 | VYSGS | 1487 | HGGESDV | 1527 |
| 139107 | GFALSNH | 1448 | VYSGS | 1488 | HGGESDV | 1528 |
| 139108 | GFTFSDY | 1449 | SSSGST | 1489 | ESGDGMDV | 1529 |
| 139110 | GFTFSDY | 1450 | SSSGNT | 1490 | STMVREDY | 1530 |
| 139112 | GFALSNH | 1451 | VYSGS | 1491 | HGGESDV | 1531 |
| 139113 | GFALSNH | 1452 | VYSGS | 1492 | HGGESDV | 1532 |
| 139114 | GFALSNH | 1453 | VYSGS | 1493 | HGGESDV | 1533 |
| 149362 | GGSISSSYY | 1454 | YYSGS | 1494 | HWQEWPDA | 1534 |
| | | | | | FDI | |
| 149363 | GFSLRTSGM | 1455 | DWDED | 1495 | SGAGGTSA | 1535 |
| | | | | | TAFDI | |
| 149364 | GFTFSSY | 1456 | SSSSSY | 1496 | TIAAVYAF | 1536 |
| | | | | | DI | |
| 149365 | GFTFSDY | 1457 | SSSGST | 1497 | DLRGAFDI | 1537 |
| 149366 | GYTVTSH | 1458 | NPSGGV | 1498 | EGSGSGWY | 1538 |
| | | | | | FDF | |
| 149367 | GGSISSGGY | 1459 | YYSGS | 1499 | AGIAARLR | 1539 |
| | | | | | GAFDI | |
| 149368 | GGTFSSY | 1460 | IPIFGT | 1500 | RGGYQLLR | 1540 |
| | | | | | WDVGLLRS | |
| | | | | | AFDI | |
| 149369 | GDSVSSNSA | 1461 | YYRSKWY | 1501 | SSPEGLFL | 1541 |
| | | | | | YWFDP | |
| BCMA_EBB- | GFTFSSY | 1462 | SGSGGS | 1502 | VEGSGSLD | 1542 |
| C1978-A4 | | | | | Y | |
| BCMA_EBB- | G1TFSRY | 1463 | SDSGVS | 1503 | RAGSEASD | 1543 |
| C1978-G1 | | | | | I | |
| BCMA_EBB- | GFTFSSY | 1464 | SGSGGS | 1504 | ATYKRELR | 1544 |
| C1979-C1 | | | | | YYYGMDV | |
| BCMA_EBB- | GFTFSSY | 1465 | SGSGGS | 1505 | ATYKRELR | 1545 |
| C1978-C7 | | | | | YYYGMDV | |
| BCMA_EBB- | GFTFDDY | 1466 | SWNSGS | 1506 | VGKAVPDV | 1546 |
| C1978-D10 | | | | | | |
| BCMA_EBB- | GFTFDDY | 1467 | NWKGNS | 1507 | HQGVAYYN | 1547 |
| C1979-C12 | | | | | YAMDV | |
| BCMA_EBB- | GFTFSSY | 1468 | SGSGGS | 1508 | VVRDGMDV | 1548 |
| C1980-G4 | | | | | | |
| BCMA_EBB- | GFTFSSY | 1469 | SGSGGS | 1509 | IPQTGTFD | 1549 |
| C1980-D2 | | | | | Y | |
| BCMA_EBB- | GFTFSSY | 1470 | SGSGGS | 1510 | ANYKRELR | 1550 |
| C1978-A10 | | | | | YYYGMDV | |
| BCMA_EBB- | GFSFSSY | 1471 | SGSGGS | 1511 | ALVGATGA | 1551 |
| C1978-D4 | | | | | FDI | |
| BCMA_EBB- | GFTFSSY | 1472 | SGSGGS | 1512 | WFGEGFDP | 1552 |
| C1980-A2 | | | | | | |
| BCMA_EBB- | GFTFSSY | 1473 | SGSGGS | 1513 | VGYDSSGY | 1553 |
| C1981-C3 | | | | | YRDYYGMD | |
| | | | | | V | |
| BCMA_EBB- | GFTFSSY | 1474 | SGSGGS | 1514 | MGWSSGYL | 1554 |
| C1978-G4 | | | | | GAFDI | |
| A7D12.2 | GYTFTNF | 1475 | NTYTGE | 1515 | GEIYYGYD | 1555 |
| | | | | | GGFAY | |
| C11D5.3 | GYTFTDY | 1476 | NTETRE | 1516 | DYSYAMDY | 1556 |
| C12A3.2 | GYTFRHY | 1477 | NTESGV | 1517 | DYLYSLDF | 1557 |
| C13F12.1 | GYTFTHY | 1478 | NTETGE | 1518 | DYLYSCDY | 1558 |

TABLE 10
Light Chain Variable Domain CDRs according
to the Chothia numbering scheme
(A1-Lazikani et al., (1997) JMB 273,927-948)

| Candidate | LCDR1 | ID | LCDR2 | ID | LCDR3 | ID |
|---|---|---|---|---|---|---|
| 139109 | SQSISSY | 1559 | AAS | 1599 | SYSTPY | 1639 |
| 139103 | SQSISSSF | 1560 | GAS | 1600 | YHSSPSW | 1640 |
| 139105 | SQSLLHSNGYNY | 1561 | LGS | 1601 | ALQTPY | 1641 |
| 139111 | SQSLLRNDGKTP | 1562 | EVS | 1602 | NIQFP | 1642 |
| 139100 | SQSLLHSNGYNY | 1563 | LGS | 1603 | ALQTPY | 1643 |
| 139101 | SQSISSY | 1564 | GAS | 1604 | SYKRA | 1644 |
| 139102 | SQSLLYSNGYNY | 1565 | LGS | 1605 | GRQFPY | 1645 |
| 139104 | SQSVSSN | 1566 | GAS | 1606 | YGSSL | 1646 |
| 139106 | SQSVSSK | 1567 | GAS | 1607 | YGSSSW | 1647 |
| 139107 | SQSVGSTN | 1568 | DAS | 1608 | YGSSPPW | 1648 |
| 139108 | SQSISSY | 1569 | AAS | 1609 | SYTL | 1649 |
| 139110 | SESLVHNSGKTY | 1570 | EVS | 1610 | GTHWPG | 1650 |
| 139112 | SEDINKF | 1571 | DAS | 1611 | YESLPL | 1651 |
| 139113 | SQSVGSN | 1572 | GAS | 1612 | YNDWLPV | 1652 |
| 139114 | SQSIGSSS | 1573 | GAS | 1613 | YAGSPPF | 1653 |
| 149362 | SQDIDDA | 1574 | SAT | 1614 | HDNFPL | 1654 |
| 149363 | SQDIYNN | 1575 | AAN | 1615 | yyRFpy | 1655 |
| 149364 | SQSLLHSNGYNY | 1576 | LGS | 1616 | ALQTPY | 1656 |
| 149365 | NNIGTKS | 1577 | DDS | 1617 | WDSDSEHV | 1657 |
| 149366 | DGLSKKY | 1578 | RDK | 1618 | WDDTTV | 1658 |
| 149367 | SQGIRNW | 1579 | AAS | 1619 | YNSAPF | 1659 |
| 149368 | NNIGSKS | 1580 | GKN | 1620 | RDSSGDHLR | 1660 |
| 149369 | DSLGNYY | 1581 | GTN | 1621 | RDSSGHHL | 1661 |
| BCMA_EBB- | SQSVSSAY | 1582 | GAS | 1622 | YGSSFNGSS | 1662 |
| C1978-A4 | | | | | LF | |
| BCMA_EBB- | SQSVSNS | 1583 | DAS | 1623 | FGTSSGL | 1663 |
| C1978-G1 | | | | | | |
| BCMA_EBB- | SQSVSSSF | 1584 | GAS | 1624 | YHSSPSW | 1664 |
| C1979-C1 | | | | | | |
| BCMA_EBB- | SQSVSTTF | 1585 | GSS | 1625 | YHSSPSW | 1665 |
| C1978-C7 | | | | | | |
| BCMA_EBB- | SQSISSY | 1586 | AAS | 1626 | SYSTPY | 1666 |
| C1978-D10 | | | | | | |
| BCMA_EBB- | TQSIGSSF | 1587 | GAS | 1627 | YESSPSW | 1667 |
| C1979-C12 | | | | | | |
| BCMA_EBB- | SQSVSSSY | 1588 | GAS | 1628 | YGSPPRF | 1668 |
| C1980-G4 | | | | | | |
| BCMA_EBB- | SQSVSSSY | 1589 | GAS | 1629 | YGSSPSW | 1669 |
| C1980-D2 | | | | | | |
| BCMA_EBB- | SQRVASNY | 1590 | GAS | 1630 | YDSSPSW | 1670 |
| C1978-A10 | | | | | | |
| BCMA_EBB- | SQSLSSNF | 1591 | GAS | 1631 | YGTSPMY | 1671 |
| C1978-D4 | | | | | | |
| BCMA_EBB- | SQSLLHSNGYNY | 1592 | LGS | 1632 | ALQTPL | 1672 |
| C1980-A2 | | | | | | |
| BCMA_EBB- | SQSVSSSY | 1593 | GTS | 1633 | YGNSPPKF | 1673 |
| C1981-C3 | | | | | | |
| BCMA_EBB- | SQSVASSF | 1594 | GAS | 1634 | YGGSPRL | 1674 |
| C1978-G4 | | | | | | |
| A7D12.2 | SQDVNTA | 1595 | SAS | 1635 | HYSTPW | 1675 |
| C11D5.3 | SESVSVIGAHL | 1596 | LAS | 1636 | SRIFPR | 1676 |
| C12A3.2 | SESVTILGSHL | 1597 | LAS | 1637 | SRTIPR | 1677 |
| C13F12.1 | SESVTILGSHL | 1598 | LAS | 1638 | SRTIPR | 1678 |

TABLE 11
Heavy Chain Variable Domain CDRs according to a combination of
the Kabat numbering scheme (Kabat et al. (1991), “Sequences of
Proteins of Immunological Interest,” 5th Ed. Public Health
Service, National Institutes of Health, Bethesda, MD) and the
Chothia numbering scheme (A1-Lazikani et al., (1997) JMB
273,927-948).

| Candidate | HCDR1 | ID | HCDR2 | ID | HCDR3 | ID |
|---|---|---|---|---|---|---|
| 139109 | GFALSNHGMS | 1679 | GIVYSGSTYYAASVKG | 1719 | HGGESDV | 1759 |
| 139103 | GFTFSNYAMS | 1680 | GISRSGENTYYADSVKG | 1720 | SPAHYYGGMDV | 1760 |
| 139105 | GFTFDDYAMH | 1681 | GISWNSGSIGYADSVKG | 1721 | HSFLAY | 1761 |
| 139111 | GFALSNHGMS | 1682 | GIVYSGSTYYAASVKG | 1722 | HGGESDV | 1762 |
| 139100 | GYIFDNFGIN | 1683 | WINPKNNNTNYAQKFQG | 1723 | GPYYYQSYMDV | 1763 |
| 139101 | GFTFSSDAMT | 1684 | VISGSGGTTYYADSVKG | 1724 | LDSSGYYYARGPRY | 1764 |
| 139102 | GYTESNYGIT | 1685 | WISAYNGNTNYAOKFQG | 1725 | GPYYYYMDV | 1765 |
| 139104 | GFALSNHGMS | 1686 | GIVYSGSTYYAASVKG | 1726 | HGGESDV | 1766 |
| 139106 | GFALSNHGMS | 1687 | GIVYSGSTYYAASVKG | 1727 | HGGESDV | 1767 |
| 139107 | GFALSNHGMS | 1688 | GIVYSGSTYYAASVKG | 1728 | HGGESDV | 1768 |
| 139108 | GFTFSDYYMS | 1689 | YISSSGSTIYYADSVKG | 1729 | ESGDGMDV | 1769 |
| 139110 | GFTFSDYYMS | 1690 | YISSSGNTIYYADSVKG | 1730 | STMVREDY | 1770 |
| 139112 | GFALSNHGMS | 1691 | GIVYSGSTYYAASVKG | 1731 | HGGESDV | 1771 |
| 139113 | GFALSNHGMS | 1692 | GIVYSGSTYYAASVKG | 1732 | HGGESDV | 1772 |
| 139114 | GFALSNHGMS | 1693 | GIVYSGSTYYAASVKG | 1733 | HGGESDV | 1773 |
| 149362 | GGSISSSYYY | 1694 | SIVYSGSAYYNPSLKS | 1734 | HWQEWPDAFDI | 1774 |
| | WG | | | | | |
| 149363 | GFSLRTSGMC | 1695 | RIDWDEDKFYSTSLKT | 1735 | SGAGGTSATAFDI | 1775 |
| | VS | | | | | |
| 149364 | GFTFSSYSMN | 1696 | SISSSSSYIYYADSVKG | 1736 | TIAAVYAFDI | 1776 |
| 149365 | GFTFSDYYMS | 1697 | YISSSGSTIYYADSVKG | 1737 | DLRGAFDI | 1777 |
| 149366 | GYTVTSHYIH | 1698 | MINPSGGVTAYSQTLQG | 1738 | EGSGSGWYFDF | 1778 |
| 149367 | GGSISSGGYY | 1699 | YIYYSGSTYYNPSLKS | 1739 | AGIAARLRGAFDI | 1779 |
| | WS | | | | | |
| 149368 | GGTFSSYAIS | 1700 | GIIPIFGTANYAQKFQG | 1740 | RGGYQLLRWDVGLL | 1780 |
| | | | | | RSAFDI | |
| 149369 | GDSVSSNSAA | 1701 | RTYYRSKWYSFYAISLKS | 1741 | SSPEGLFLYWFDP | 1781 |
| | WN | | | | | |
| BCMAJEBB- | GFTFSSYAMS | 1702 | AISGSGGSTYYADSVKG | 1742 | VEGSGSLDY | 1782 |
| C1978-A4 | | | | | | |
| BCMA_EBB- | GITFSRYPMS | 1703 | GISDSGVSTYYADSAKG | 1743 | RAGSEASDI | 1783 |
| C1978-G1 | | | | | | |
| BCMA_EBB- | GFTFSSYAMS | 1704 | AISGSGGSTYYADSVKG | 1744 | ATYKRELRYYYGMD | 1784 |
| C1979-C1 | | | | | V | |
| BCMA_EBB- | GFTFSSYAMS | 1705 | AISGSGGSTYYADSVKG | 1745 | ATYKRELRYYYGMD | 1785 |
| C1978-C7 | | | | | V | |
| BCMA_EBB- | GFTFDDYAMH | 1706 | GISWNSGSIGYADSVKG | 1746 | VGKAVPDV | 1786 |
| C1978-D10 | | | | | | |
| BCMA_EBB- | GFTFDDYAMH | 1707 | SIMVKGNSLAYGDSVKG | 1747 | HQGVAYYNYAMDV | 1787 |
| C1979-C12 | | | | | | |
| BCMA_EBB- | GFTFSSYAMS | 1708 | AISGSGGSTYYADSVKG | 1748 | VVRDGMDV | 1788 |
| C1980-G4 | | | | | | |
| BCMA_EBB- | GFTFSSYAMS | 1709 | AISGSGGSTYYADSVKG | 1749 | IPQTGTFDY | 1789 |
| C1980-D2 | | | | | | |
| BCMA_EBB- | GFTFSSYAMS | 1710 | AISGSGGSTYYADSVKG | 1750 | ANYKRELRYYYGMD | 1790 |
| C1978-A10 | | | | | V | |
| BCMA_EBB- | GFSFSSYAMS | 1711 | AISGSGGSTYYADSVKG | 1751 | ALVGATGAFDI | 1791 |
| C1978-D4 | | | | | | |
| BCMA_EBB- | GFTFSSYAMS | 1712 | AISGSGGSTYYADSVKG | 1752 | WFGEGFDP | 1792 |
| C1980-A2 | | | | | | |
| BCMA_EBB- | GFTFSSYAMS | 1713 | AISGSGGSTYYADSVKG | 1753 | VGYDSSGYYRDYYG | 1793 |
| C1981-C3 | | | | | MDV | |
| BCMA_EBB- | GFTFSSYAMS | 1714 | AISGSGGSTYYADSVKG | 1754 | MGWSSGYLGAFDI | 1794 |
| C1978-G4 | | | | | | |
| A7D12.2 | GYTFTNFGMN | 1715 | WINTYTGESYFADDFKG | 1755 | GEIYYGYDGGFAY | 1795 |
| C11D5.3 | GYTFTDYSIN | 1716 | WINTETREPAYAYDFRG | 1756 | DYSYAMDY | 1796 |
| C12A3.2 | GYTFRHYSMN | 1717 | RINTESGVPIYADDFKG | 1757 | DYLYSLDF | 1797 |
| C13F12.1 | GYTFTHYSMN | 1718 | RINTETGEPLYADDFKG | 1758 | DYLYSCDY | 1798 |

TABLE 12
Light Chain Variable Domain CDRs according to a combination of
the Kabat numbering scheme (Kabat et al. (1991), “Sequences of
Proteins of Immunological Interest,” 5th Ed. Public Health
Service, National Institutes of Health, Bethesda, MD) and the
Chothia numbering scheme (A1-Lazikani et al., (1997) JMB
273,927-948).

| Candidate | LCDR1 | ID | LCDR2 | ID | LCDR3 | ID |
|---|---|---|---|---|---|---|
| 139109 | RASQSISSYLN | 1799 | AASSLQS | 1839 | QQSYSTPYT | 1879 |
| 139103 | RASQSISSSFLA | 1800 | GASRRAT | 1840 | QQYHSSPSWT | 1880 |
| 139105 | RSSQSLLHSNGYNYLD | 1801 | LGSNRAS | 1841 | MQALQTPYT | 1881 |
| 139111 | KSSQSLLRNDGKTPLY | 1802 | EVSNRFS | 1842 | MQNIQFPS | 1882 |
| 139100 | RSSQSLLHSNGYNYLN | 1803 | LGSKRAS | 1843 | MQALQTPYT | 1883 |
| 139101 | RASQSISSYLN | 1804 | GASTLAS | 1844 | QQSYKRAS | 1884 |
| 139102 | RSSQSLLYSNGYNYVD | 1805 | LGSNRAS | 1845 | MQGRQFPYS | 1885 |
| 139104 | RASQSVSSNLA | 1806 | GASTRAS | 1846 | QQYGSSLT | 1886 |
| 139106 | RASQSVSSKLA | 1807 | GASIRAT | 1847 | QQYGSSSWT | 1887 |
| 139107 | RASQSVGSTNLA | 1808 | DASNRAT | 1848 | QQYGSSPPWT | 1888 |
| 139108 | RASQSISSYLN | 1809 | AASSLQS | 1849 | QQSYTLA | 1889 |
| 139110 | KSSESLVHNSGKTYLN | 1810 | EVSNRDS | 1850 | MQGTHWPGT | 1890 |
| 139112 | QASEDINKFLN | 1811 | DASTLQT | 1851 | QQYESLPLT | 1891 |
| 139113 | RASQSVGSNLA | 1812 | GASTRAT | 1852 | QQYNDWLPVT | 1892 |
| 139114 | RASQSIGSSSLA | 1813 | GASSRAS | 1853 | QQYAGSPPFT | 1893 |
| 149362 | KASQDIDDAMN | 1814 | SATSPVP | 1854 | LQHDNFPLT | 1894 |
| 149363 | RASQDIYNNLA | 1815 | AANKSQS | 1855 | QHYYRFPYS | 1895 |
| 149364 | RSSQSLLHSNGYNYLD | 1816 | LGSNRAS | 1856 | MQALQTPYT | 1896 |
| 149365 | GGNNIGTKSVH | 1817 | DDSVRPS | 1857 | QVWDSDSEHV | 1897 |
| | | | | | V | |
| 149366 | SGDGLSKKYVS | 1818 | RDKERPS | 1858 | QAWDDTTVV | 1898 |
| 149367 | RASQGIRNWLA | 1819 | AASNLQS | 1859 | QKYNSAPFT | 1899 |
| 149368 | GGNNIGSKSVH | 1820 | GKNNRPS | 1860 | SSRDSSGDHL | 1900 |
| | | | | | RV | |
| 149369 | QGDSLGNYYAT | 1821 | GTNNRPS | 1861 | NSRDSSGHHL | 1901 |
| | | | | | L | |
| BCMA_EBB- | RASQSVSSAYLA | 1822 | GASTRAT | 1862 | QHYGSSFNGS | 1902 |
| C1978-A4 | | | | | SLFT | |
| BCMA_EBB- | RASQSVSNSLA | 1823 | DASSRAT | 1863 | QQFGTSSGLT | 1903 |
| C1978-G1 | | | | | | |
| BCMA_EBB- | RASQSVSSSFLA | 1824 | GASSRAT | 1864 | QQYHSSPSWT | 1904 |
| C1979-C1 | | | | | | |
| BCMA_EBB- | RASQSVSTTFLA | 1825 | GSSNRAT | 1865 | QQYHSSPSWT | 1905 |
| C1978-C7 | | | | | | |
| BCMA_EBB- | RASQSISSYLN | 1826 | AASSLQS | 1866 | QQSYSTPYS | 1906 |
| C1978-D10 | | | | | | |
| BCMA_EBB- | RATQSIGSSFLA | 1827 | GASQRAT | 1867 | QHYESSPSWT | 1907 |
| C1979-C12 | | | | | | |
| BGMAJEBB- | RASQSVSSSYLA | 1828 | GASSRAT | 1868 | QQYGSPPRFT | 1908 |
| C1980-G4 | | | | | | |
| BCMA_EBB- | RASQSVSSSYLA | 1829 | GASSRAT | 1869 | QHYGSSPSWT | 1909 |
| C1980-D2 | | | | | | |
| BCMA_EBB- | RASQRVASNYLA | 1830 | GASSRAT | 1870 | QHYDSSPSWT | 1910 |
| C1978-A10 | | | | | | |
| BCMA_EBB- | RASQSLSSNFLA | 1831 | GASNWAT | 1871 | QYYGTSPMYT | 1911 |
| C1978-D4 | | | | | | |
| BCMA_EBB- | RSSQSLLHSNGYNYLD | 1832 | LGSNRAS | 1872 | MQALQTPLT | 1912 |
| C1980-A2 | | | | | | |
| BCMA_EBB- | RASQSVSSSYLA | 1833 | GTSSRAT | 1873 | QHYGNSPPKFT | 1913 |
| C1981-C3 | | | | | | |
| BCMA_EBB- | RASQSVASSFLA | 1834 | GASGRAT | 1874 | QHYGGSPRLT | 1914 |
| C1978-G4 | | | | | | |
| A7D12.2 | RASQDVNTAVS | 1835 | SASYRYT | 1875 | QQHYSTPWT | 1915 |
| C11D5.3 | RASESVSVIGAHLIH | 1836 | LASNLET | 1876 | LQSRIFPRT | 1916 |
| C12A3.2 | RASESVTILGSHLIY | 1837 | LASNVQT | 1877 | LQSRTIPRT | 1917 |
| C13F12.1 | RASESVTILGSHLIY | 1838 | LASNVQT | 1878 | LQSRTIPRT | 1918 |

[0712] In certain embodiments, the CAR molecule described herein (e.g., the CAR nucleic acid or the CAR polypeptide) or a BCMA binding domain includes:

[0713] (1) one, two, or three light chain (LC) CDRs chosen from one of the following:
[0714] (i) a LC CDR1 of SEQ ID NO: 1320, LC CDR2 of SEQ ID NO: 1360 and LC CDR3 of SEQ ID NO: 1400 of BCMA-4 CAR (139103);
[0715] (ii) a LC CDR1 of SEQ ID NO: 1319, LC CDR2 of SEQ ID NO: 1359 and LC CDR3 of SEQ ID NO: 1399 of BCMA-10 CAR (139109);
[0716] (iii) a LC CDR1 of SEQ ID NO: 1331, LC CDR2 of SEQ ID NO: 1371 and LC CDR3 of SEQ ID NO: 1411 of BCMA-13 CAR (139112); or
[0717] (iv) a LC CDR1 of SEQ ID NO: 1333, LC CDR2 of SEQ ID NO: 1373 and LC CDR3 of SEQ ID NO: 1413 of BCMA-15 CAR (139114), and/or

[0718] (2) one, two, or three heavy chain (HC) CDRs from one of the following:
[0719] (i) a HC CDR1 of SEQ ID NO: 1200, HC CDR2 of SEQ ID NO: 1240 and HC CDR3 of SEQ ID NO: 1280 of BCMA-4 CAR (139103);
[0720] (ii) a HC CDR1 of SEQ ID NO: 1199, HC CDR2 of SEQ ID NO: 1239 and HC CDR3 of SEQ ID NO: 1279 of BCMA-10 CAR (139109);
[0721] (iii) a HC CDR1 of SEQ ID NO: 1121, HC CDR2 of SEQ ID NO: 1251 and HC CDR3 of SEQ ID NO: 1291 of BCMA-13 CAR (139112); or
[0722] (iv) a HC CDR1 of SEQ ID NO: 1213, HC CDR2 of SEQ ID NO: 1253 and HC CDR3 of SEQ ID NO: 1293 of BCMA-15 (139114).

[0723] In certain embodiments, the CAR molecule described herein (e.g., the CAR nucleic acid or the CAR polypeptide) includes:

[0724] (1) one, two, or three light chain (LC) CDRs chosen from one of the following:
[0725] (i) a LC CDR1 of SEQ ID NO: 1560, LC CDR2 of SEQ ID NO: 1600 and LC CDR3 of SEQ ID NO: 1640 of BCMA-4 CAR (139103);
[0726] (ii) a LC CDR1 of SEQ ID NO: 1559, LC CDR2 of SEQ ID NO: 1599 and LC CDR3 of SEQ ID NO: 1639 of BCMA-10 CAR (139109);
[0727] (iii) a LC CDR1 of SEQ ID NO: 1571, LC CDR2 of SEQ ID NO: 1611 and LC CDR3 of SEQ ID NO: 1651 of BCMA-13 CAR (139112); or
[0728] (iv) a LC CDR1 of SEQ ID NO: 1573, LC CDR2 of SEQ ID NO: 1613 and LC CDR3 of SEQ ID NO: 1653 of BCMA-15 CAR (139114); and/or

[0729] (2) one, two, or three heavy chain (HC) CDRs chosen from one of the following:
[0730] (i) a HC CDR1 of SEQ ID NO: 1440, HC CDR2 of SEQ ID NO: 1480 and HC CDR3 of SEQ ID NO: 1520 of BCMA-4 CAR (139103);
[0731] (ii) a HC CDR1 of SEQ ID NO: 1439, HC CDR2 of SEQ ID NO: 1479 and HC CDR3 of SEQ ID NO: 1519 of BCMA-10 CAR (139109);
[0732] (iii) a HC CDR1 of SEQ ID NO: 1451, HC CDR2 of SEQ ID NO: 1491 and HC CDR3 of SEQ ID NO: 1531 of BCMA-13 CAR (139112); or
[0733] (iv) a HC CDR1 of SEQ ID NO: 1453, HC CDR2 of SEQ ID NO: 1493 and HC CDR3 of SEQ ID NO: 1533 of BCMA-15 CAR (139114).

[0734] In certain embodiments, the CAR molecule described herein (e.g., the CAR nucleic acid or the CAR polypeptide) includes:

[0735] (1) one, two, or three light chain (LC) CDRs chosen from one of the following:
[0736] (i) a LC CDR1 of SEQ ID NO: 1800 LC CDR2 of SEQ ID NO: 1840 and LC CDR3 of SEQ ID NO: 1880 of BCMA-4 CAR (139103);
[0737] (ii) a LC CDR1 of SEQ ID NO: 1799, LC CDR2 of SEQ ID NO: 1839 and LC CDR3 of SEQ ID NO: 1879 of BCMA-10 CAR (139109);
[0738] (iii) a LC CDR1 of SEQ ID NO: 1811, LC CDR2 of SEQ ID NO: 1851 and LC CDR3 of SEQ ID NO: 1891 of BCMA-13 CAR (139112); or
[0739] (iv) a LC CDR1 of SEQ ID NO: 1813, LC CDR2 of SEQ ID NO: 1853 and LC CDR3 of SEQ ID NO: 1893 of BCMA-15 CAR (139114); and/or

[0740] (2) one, two, or three heavy chain (HC) CDRs chosen from one of the following:
[0741] (i) a HC CDR1 of SEQ ID NO: 1680, HC CDR2 of SEQ ID NO: 1720 and HC CDR3 of SEQ ID NO: 1760 of BCMA-4 CAR (139103);
[0742] (ii) a HC CDR1 of SEQ ID NO: 1679, HC CDR2 of SEQ ID NO: 1719 and HC CDR3 of SEQ ID NO: 1759 of BCMA-10 CAR (139109);
[0743] (iii) a HC CDR1 of SEQ ID NO: 1691, HC CDR2 of SEQ ID NO: 1731 and HC CDR3 of SEQ ID NO: 1771 of BCMA-13 CAR (139112);
[0744] (iv) a HC CDR1 of SEQ ID NO: 1693, HC CDR2 of SEQ ID NO: 1733 and HC CDR3 of SEQ ID NO: 1773 of BCMA-15 CAR (139114).

### Exemplary Components of the CAR Molecules:

Leader (amino acid sequence)
(SEQ ID NO: 1919)
MALPVTALLLPLALLLHAARP
leader (nucleic acid sequence)
(SEQ ID NO: 1920)
ATGGCCCTGCCTGTGACAGCCCTGCTGCTGCCTCTGGCTCTGCTGCTGCA
TGCCGCTAGACCC
leader (nucleic acid sequence)
(SEQ ID NO: 2000)
ATGGCCCTCCCTGTCACCGCCCTGCTGCTTCCGCTGGCTCTTCTGCTCCA
CGCCGCTCGGCCC
CD8 hinge (amino acid sequence)
(SEQ ID NO: 1921)
TTTPAPRPPTPAPTIASQPLSLRPEACRPAAGGAVHTRGLDFACD
CD8 hinge (nucleic acid sequence)
(SEQ ID NO: 1922)
ACCACGACGCCAGCGCCGCGACCACCAACACCGGCGCCCACCATCGCGTC
GCAGCCCCTGTCCCTGCGCCCAGAGGCGTGCCGGCCAGCGGCGGGGGGCG
CAGTGCACACGAGGGGGCTGGACTTCGCCTGTGAT
CD8 transmembrane (amino acid sequence)
(SEQ ID NO: 1923)
IYIWAPLAGTCGVLLLSLVITLYC
CD8 transmembrane (nucleic acid sequence)
(SEQ ID NO: 1924)
ATCTACATCTGGGCGCCCTTGGCCGGGACTTGTGGGGTCCTTCTCCTGTC
ACTGGTTATCACCCTTTACTGC
CD8 transmembrane (nucleic acid sequence)
(SEQ ID NO: 2001)
ATCTACATTTGGGCCCCTCTGGCTGGTACTTGCGGGGTCCTGCTGCTTTC
ACTCGTGATCACTCTTTACTGT
4-1BB Intracellular domain (amino acid
sequence)
(SEQ ID NO: 1925)
KRGRKKLLYIFKQPFMRPVQTTQEEDGCSCRFPEEEEGGCEL
4-1BB Intracellular domain (nucleic acid
sequence)
(SEQ ID NO: 1926)
AAACGGGGCAGAAAGAAACTCCTGTATATATTCAAACAACCATTTATGAG
ACCAGTACAAACTACTCAAGAGGAAGATGGCTGTAGCTGCCGATTTCCAG
AAGAAGAAGAAGGAGGATGTGAACTG
4-1BB Intracellular domain (nucleic acid
sequence)
(SEQ ID NO: 2002)
AAGCGCGGTCGGAAGAAGCTGCTGTACATCTTTAAGCAACCCTTCATGAG
GCCTGTGCAGACTACTCAAGAGGAGGACGGCTGTTCATGCCGGTTCCCAG
AGGAGGAGGAAGGCGGCTGCGAACTG
CD28 Intracellular domain (amino acid
sequence)
(SEQ ID NO: 1927)
RSKRSRLLHSDYMNMTPRRPGPTRKHYQPYAPPRDFAAYRS (SEQ ID
NO: 1927)
CD28 Intracellular domain (nucleotide
sequence)
(SEQ ID NO: 1928)
AGGAGTAAGAGGAGCAGGCTCCTGCACAGTGACTACATGAACATGACTCC
CCGCCGCCCCGGGCCCACCCGCAAGCATTACCAGCCCTATGCCCCACCAC
GCGACTTCGCAGCCTATCGCTCC (SEQ ID NO: 1928)
ICOS Intracellular domain (amino acid
sequence)
(SEQ ID NO: 1929)
T K K K Y S S S V H D P N G E Y M F M R A V N T A
K K S R L T D V T L (SEQ ID NO: 1929)
ICOS Intracellular domain (nucleotide
sequence)
(SEQ ID NO: 1930)
ACAAAAAAGAAGTATTCATCCAGTGTGCACGACCCTAACGGTGAATACAT
GTTCATGAGAGCAGTGAACACAGCCAAAAAATCCAGACTCACAGATGTGA
CCCTA (SEQ ID NO: 1930)
CD3 zeta domain (amino acid sequence)
(SEQ ID NO: 1931)
RVKFSRSADAPAYKQGQNQLYNELNLGRREEYDVLDKRRGRDPEMGGKPR
RKNPQEGLYNELQKDKMAEAYSEIGMKGERRRGKGHDGLYQGLSTATKDT
YDALHMQALPPR
CD3 zeta (nucleic acid sequence)
(SEQ ID NO: 1932)
AGAGTGAAGTTCAGCAGGAGCGCAGACGCCCCCGCGTACAAGCAGGGCCA
GAACCAGCTCTATAACGAGCTCAATCTAGGACGAAGAGAGGAGTACGATG
TTTTGGACAAGAGACGTGGCCGGGACCCTGAGATGGGGGGAAAGCCGAGA
AGGAAGAACCCTCAGGAAGGCCTGTACAATGAACTGCAGAAAGATAAGAT
GGCGGAGGCCTACAGTGAGATTGGGATGAAAGGCGAGCGCCGGAGGGGCA
AGGGGCACGATGGCCTTTACCAGGGTCTCAGTACAGCCACCAAGGACACC
TACGACGCCCTTCACATGCAGGCCCTGCCCCCTCGC
CD3 zeta (nucleic acid sequence)
(SEQ ID NO: 2003)
CGCGTGAAATTCAGCCGCAGCGCAGATGCTCCAGCCTACAAGCAGGGGCA
GAACCAGCTCTACAACGAACTCAATCTTGGTCGGAGAGAGGAGTACGACG
TGCTGGACAAGCGGAGAGGACGGGACCCAGAAATGGGCGGGAAGCCGCGC
AGAAAGAATCCCCAAGAGGGCCTGTACAACGAGCTCCAAAAGGATAAGAT
GGCAGAAGCCTATAGCGAGATTGGTATGAAAGGGGAACGCAGAAGAGGCA
AAGGCCACGACGGACTGTACCAGGGACTCAGCACCGCCACCAAGGACACC
TATGACGCTCTTCACATGCAGGCCCTGCCGCCTCGG
CD3 zeta domain (amino acid sequence; NCBI
Reference NM_000734.3)
(SEQ ID NO: 1933)
RVKFSRSADAPAYQQGQNQLYNELNLGRREEYDVLDKRRGRDPEMGGKPR
RKNPQEGLYNELQKDKMAEAYSEIGMKGERRRGKGHDGLYQGLSTATKDT
YDALHMQALPPR
CD3 zeta (nucleic acid sequence; NCBI
Reference Sequence NM_000734.3);
(SEQ ID NO: 1934)
AGAGTGAAGTTCAGCAGGAGCGCAGACGCCCCCGCGTACCAGCAGGGCCA
GAACCAGCTCTATAACGAGCTCAATCTAGGACGAAGAGAGGAGTACGATG
TTTTGGACAAGAGACGTGGCCGGGACCCTGAGATGGGGGGAAAGCCGAGA
AGGAAGAACCCTCAGGAAGGCCTGTACAATGAACTGCAGAAAGATAAGAT
GGCGGAGGCCTACAGTGAGATTGGGATGAAAGGCGAGCGCCGGAGGGGCA
AGGGGCACGATGGCCTTTACCAGGGTCTCAGTACAGCCACCAAGGACACC
TACGACGCCCTTCACATGCAGGCCCTGCCCCCTCGC
IgG4 Hinge (amino acid sequence)
(SEQ ID NO: 1935)
ESKYGPPCPPCPAPEFLGGPSVFLFPPKPKDTLMISRTPEVTCVVVDVSQ
EDPEVQFNWYVDGVEVHNAKTKPREEQFNSTYRVVSVLTVLHQDWLNGKE
YKCKVSNKGLPSSIEKTISKAKGQPREPQVYTLPPSQEEMTKNQVSLTCL
VKGFYPSDIAVEWESNGQPENNYKTTPPVLDSDGSFFLYSRLTVDKSRWQ
EGNVFSCSVMHEALHNHYTQKSLSLSLGKM
IgG4 Hinge (nucleotide sequence)
(SEQ ID NO: 1936)
GAGAGCAAGTACGGCCCTCCCTGCCCCCCTTGCCCTGCCCCCGAGTTCCT
GGGCGGACCCAGCGTGTTCCTGTTCCCCCCCAAGCCCAAGGACACCCTGA
TGATCAGCCGGACCCCCGAGGTGACCTGTGTGGTGGTGGACGTGTCCCAG
GAGGACCCCGAGGTCCAGTTCAACTGGTACGTGGACGGCGTGGAGGTGCA
CAACGCCAAGACCAAGCCCCGGGAGGAGCAGTTCAATAGCACCTACCGGG
TGGTGTCCGTGCTGACCGTGCTGCACCAGGACTGGCTGAACGGCAAGGAA
TACAAGTGTAAGGTGTCCAACAAGGGCCTGCCCAGCAGCATCGAGAAAAC
CATCAGCAAGGCCAAGGGCCAGCCTCGGGAGCCCCAGGTGTACACCCTGC
CCCCTAGCCAAGAGGAGATGACCAAGAACCAGGTGTCCCTGACCTGCCTG
GTGAAGGGCTTCTACCCCAGCGACATCGCCGTGGAGTGGGAGAGCAACGG
CCAGCCCGAGAACAACTACAAGACCACCCCCCCTGTGCTGGACAGCGACG
GCAGCTTCTTCCTGTACAGCCGGCTGACCGTGGACAAGAGCCGGTGGCAG
GAGGGCAACGTCTTTAGCTGCTCCGTGATGCACGAGGCCCTGCACAACCA
CTACACCCAGAAGAGCCTGAGCCTGTCCCTGGGCAAGATG

### Mesothelin CAR

[0745] In an embodiment, the CAR molecule comprises a mesothelin CAR described herein, e.g., a mesothelin CAR described in WO 2015/090230, incorporated herein by reference. In embodiments, the mesothelin CAR comprises an amino acid, or has a nucleotide sequence shown in WO 2015/090230 incorporated herein by reference, or a sequence substantially identical to any of the aforesaid sequences (e.g., at least 85%, 90%, 95% or more identical to any of the aforesaid mesothelin CAR sequences). In one embodiment, the CAR molecule comprises a mesothelin CAR, or an antigen binding domain according to Tables 2-3 of WO 2015/090230, incorporated herein by reference, or a sequence substantially identical thereto (e.g., at least 85%, 90%, 95% or more identical thereto). The amino acid and nucleotide sequences encoding the mesothelin CAR molecules and antigen binding domains (e.g., including one, two, three VH CDRs; and one, two, three VL CDRs according to Kabat or Chothia), are specified in WO 2015/090230.

### CLL-1 CAR

[0746] In an embodiment, the CAR molecule comprises a CLL1 CAR described herein, e.g., a CLL1 CAR described in US2016/0051651A1, incorporated herein by reference. In embodiments, the CLL1 CAR comprises an amino acid, or has a nucleotide sequence shown in US2016/0051651A1, incorporated herein by reference, or a sequence substantially identical to any of the aforesaid sequences (e.g., at least 85%, 90%, 95% or more identical to any of the aforesaid CLL1 CAR sequences).

[0747] In other embodiments, the CLL1 CAR includes a CAR molecule, or an antigen binding domain according to Table 2 of WO2016/014535, incorporated herein by reference, or a sequence substantially identical to any of the aforesaid sequences (e.g., at least 85%, 90%, 95% or more identical to any of the aforesaid CLL1 CAR sequences). The amino acid and nucleotide sequences encoding the CLL-1 CAR molecules and antigen binding domains (e.g., including one, two, three VH CDRs; and one, two, three VL CDRs according to Kabat or Chothia), are specified in WO2016/014535.

### CD33 CAR

[0748] In an embodiment, the CAR molecule comprises a CD33 CAR described herein, e.g., a CD33 CAR described in US2016/0096892A1, incorporated herein by reference. In embodiments, the CD33 CAR comprises an amino acid, or has a nucleotide sequence shown in US2016/0096892A1, incorporated herein by reference, or a sequence substantially identical to any of the aforesaid sequences (e.g., at least 85%, 90%, 95% or more identical to any of the aforesaid CD33 CAR sequences). In other embodiments, the CD33 CAR CAR or antigen binding domain thereof can include a CAR molecule (e.g., any of CAR33-1 to CAR-33-9), or an antigen binding domain according to Table 2 or 9 of WO2016/014576, incorporated herein by reference, or a sequence substantially identical to any of the aforesaid sequences (e.g., at least 85%, 90%, 95% or more identical to any of the aforesaid CD33 CAR sequences). The amino acid and nucleotide sequences encoding the CD33 CAR molecules and antigen binding domains (e.g., including one, two, three VH CDRs; and one, two, three VL CDRs according to Kabat or Chothia), are specified in WO2016/014576.

### CD123 CAR

[0749] In embodiments, the CAR molecule comprises a CD123 CAR described herein, e.g., a CD123 CAR described in US2014/0322212A1 or US2016/0068601A1, both incorporated herein by reference. In embodiments, the CD123 CAR comprises an amino acid, or has a nucleotide sequence shown in US2014/0322212A1 or US2016/0068601A1, both incorporated herein by reference, or a sequence substantially identical to any of the aforesaid sequences (e.g., at least 85%, 90%, 95% or more identical to any of the aforesaid CD123 CAR sequences). In one embodiment, the CAR molecule comprises a CD123 CAR (e.g., any of the CAR1-CAR8), or an antigen binding domain according to Tables 1-2 of WO 2014/130635, incorporated herein by reference, or a sequence substantially identical thereto (e.g., at least 85%, 90%, 95% or more identical to any of the aforesaid CD123 CAR sequences). The amino acid and nucleotide sequences encoding the CD123 CAR molecules and antigen binding domains (e.g., including one, two, three VH CDRs; and one, two, three VL CDRs according to Kabat or Chothia), are specified in WO 2014/130635.

[0750] In other embodiments, the CAR molecule comprises a CD123 CAR comprises a CAR molecule (e.g., any of the CAR123-1 to CAR123-4 and hzCAR123-1 to hzCAR123-32), or an antigen binding domain according to Tables 2, 6, and 9 of WO2016/028896, incorporated herein by reference, or a sequence substantially identical thereto (e.g., at least 85%, 90%, 95% or more identical to any of the aforesaid CD123 CAR sequences). The amino acid and nucleotide sequences encoding the CD123 CAR molecules and antigen binding domains (e.g., including one, two, three VH CDRs; and one, two, three VL CDRs according to Kabat or Chothia), are specified in WO2016/028896.

### EGFRvIII CAR

[0751] In an embodiment, the CAR molecule comprises an EGFRvIII CAR molecule described herein, e.g., an EGFRvIII CAR described US2014/0322275A1, incorporated herein by reference. In embodiments, the EGFRvIII CAR comprises an amino acid, or has a nucleotide sequence shown in US2014/0322275A1, incorporated herein by reference, or a sequence substantially identical to any of the aforesaid sequences (e.g., at least 85%, 90%, 95% or more identical to any of the aforesaid EGFRVIII CAR sequences). In one embodiment, the CAR molecule comprises an EGFRvIII CAR, or an antigen binding domain according to Table 2 or SEQ ID NO:11 of WO 2014/130657, incorporated herein by reference, or a sequence substantially identical thereto (e.g., at least 85%, 90%, 95% or more identical thereto). The amino acid and nucleotide sequences encoding the EGFRVIII CAR molecules and antigen binding domains (e.g., including one, two, three VH CDRs; and one, two, three VL CDRs according to Kabat or Chothia), are specified in WO 2014/130657.

### RNA Transfection

[0752] Disclosed herein are methods for producing an in vitro transcribed RNA anti-target CAR. The present invention also includes an anti-target CAR encoding RNA construct that can be directly transfected into a cell. A method for generating mRNA for use in transfection can involve in vitro transcription (IVT) of a template with specially designed primers, followed by polyA addition, to produce a construct containing 3′ and 5′ untranslated sequence (“UTR”), a 5′ cap and/or Internal Ribosome Entry Site (IRES), the nucleic acid to be expressed, and a polyA tail, typically 50-2000 bases in length (SEQ ID NO: 32). RNA so produced can efficiently transfect different kinds of cells. In one aspect, the template includes sequences for the CAR.

[0753] In one aspect, an anti-target CAR of the present invention is encoded by a messenger RNA (mRNA). In one aspect, the mRNA encoding an anti-target CAR described herein is introduced into an immune effector cell, e.g., a T cell or a NK cell, for production of an anti-target CAR-expressing cell, e.g., a CART cell or a CAR NK cell.

[0754] In one embodiment, the in vitro transcribed RNA anti-target CAR can be introduced to a cell as a form of transient transfection. The RNA is produced by in vitro transcription using a polymerase chain reaction (PCR)-generated template. DNA of interest from any source can be directly converted by PCR into a template for in vitro mRNA synthesis using appropriate primers and RNA polymerase. The source of the DNA can be, for example, genomic DNA, plasmid DNA, phage DNA, cDNA, synthetic DNA sequence or any other appropriate source of DNA. The desired temple for in vitro transcription is an anti-target CAR described herein. For example, the template for the RNA anti-target CAR comprises an extracellular region comprising a single chain variable domain of an antibody to a tumor associated antigen described herein; a hinge region (e.g., a hinge region described herein), a transmembrane domain (e.g., a transmembrane domain described herein); and a cytoplasmic region that includes an intracellular signaling domain, e.g., an intracellular signaling domain described herein, e.g., comprising the signaling domain of CD3-zeta and the signaling domain of 4-1BB.

[0755] In one embodiment, the DNA to be used for PCR contains an open reading frame. The DNA can be from a naturally occurring DNA sequence from the genome of an organism. In one embodiment, the nucleic acid can include some or all of the 5′ and/or 3′ untranslated regions (UTRs). The nucleic acid can include exons and introns. In one embodiment, the DNA to be used for PCR is a human nucleic acid sequence. In another embodiment, the DNA to be used for PCR is a human nucleic acid sequence including the 5′ and 3′ UTRs. The DNA can alternatively be an artificial DNA sequence that is not normally expressed in a naturally occurring organism. An exemplary artificial DNA sequence is one that contains portions of genes that are ligated together to form an open reading frame that encodes a fusion protein. The portions of DNA that are ligated together can be from a single organism or from more than one organism.

[0756] PCR is used to generate a template for in vitro transcription of mRNA which is used for transfection. Methods for performing PCR are well known in the art. Primers for use in PCR are designed to have regions that are substantially complementary to regions of the DNA to be used as a template for the PCR. “Substantially complementary,” as used herein, refers to sequences of nucleotides where a majority or all of the bases in the primer sequence are complementary, or one or more bases are non-complementary, or mismatched. Substantially complementary sequences are able to anneal or hybridize with the intended DNA target under annealing conditions used for PCR. The primers can be designed to be substantially complementary to any portion of the DNA template. For example, the primers can be designed to amplify the portion of a nucleic acid that is normally transcribed in cells (the open reading frame), including 5′ and 3′ UTRs. The primers can also be designed to amplify a portion of a nucleic acid that encodes a particular domain of interest. In one embodiment, the primers are designed to amplify the coding region of a human cDNA, including all or portions of the 5′ and 3′ UTRs. Primers useful for PCR can be generated by synthetic methods that are well known in the art. “Forward primers” are primers that contain a region of nucleotides that are substantially complementary to nucleotides on the DNA template that are upstream of the DNA sequence that is to be amplified. “Upstream” is used herein to refer to a location 5, to the DNA sequence to be amplified relative to the coding strand. “Reverse primers” are primers that contain a region of nucleotides that are substantially complementary to a double-stranded DNA template that are downstream of the DNA sequence that is to be amplified. “Downstream” is used herein to refer to a location 3′ to the DNA sequence to be amplified relative to the coding strand.

[0757] Any DNA polymerase useful for PCR can be used in the methods disclosed herein. The reagents and polymerase are commercially available from a number of sources.

[0758] Chemical structures with the ability to promote stability and/or translation efficiency may also be used. The RNA preferably has 5′ and 3′ UTRs. In one embodiment, the 5′ UTR is between one and 3000 nucleotides in length. The length of 5′ and 3′ UTR sequences to be added to the coding region can be altered by different methods, including, but not limited to, designing primers for PCR that anneal to different regions of the UTRs. Using this approach, one of ordinary skill in the art can modify the 5′ and 3′ UTR lengths required to achieve optimal translation efficiency following transfection of the transcribed RNA.

[0759] The 5′ and 3′ UTRs can be the naturally occurring, endogenous 5′ and 3′ UTRs for the nucleic acid of interest. Alternatively, UTR sequences that are not endogenous to the nucleic acid of interest can be added by incorporating the UTR sequences into the forward and reverse primers or by any other modifications of the template. The use of UTR sequences that are not endogenous to the nucleic acid of interest can be useful for modifying the stability and/or translation efficiency of the RNA. For example, it is known that AU-rich elements in 3′ UTR sequences can decrease the stability of mRNA. Therefore, 3′ UTRs can be selected or designed to increase the stability of the transcribed RNA based on properties of UTRs that are well known in the art.

[0760] In one embodiment, the 5′ UTR can contain the Kozak sequence of the endogenous nucleic acid. Alternatively, when a 5′ UTR that is not endogenous to the nucleic acid of interest is being added by PCR as described above, a consensus Kozak sequence can be redesigned by adding the 5′ UTR sequence. Kozak sequences can increase the efficiency of translation of some RNA transcripts, but does not appear to be required for all RNAs to enable efficient translation. The requirement for Kozak sequences for many mRNAs is known in the art. In other embodiments the 5′ UTR can be 5′UTR of an RNA virus whose RNA genome is stable in cells. In other embodiments various nucleotide analogues can be used in the 3′ or 5′ UTR to impede exonuclease degradation of the mRNA.

[0761] To enable synthesis of RNA from a DNA template without the need for gene cloning, a promoter of transcription should be attached to the DNA template upstream of the sequence to be transcribed. When a sequence that functions as a promoter for an RNA polymerase is added to the 5′ end of the forward primer, the RNA polymerase promoter becomes incorporated into the PCR product upstream of the open reading frame that is to be transcribed. In one preferred embodiment, the promoter is a T7 polymerase promoter, as described elsewhere herein. Other useful promoters include, but are not limited to, T3 and SP6 RNA polymerase promoters. Consensus nucleotide sequences for T7, T3 and SP6 promoters are known in the art.

[0762] In a preferred embodiment, the mRNA has both a cap on the 5′ end and a 3′ poly (A) tail which determine ribosome binding, initiation of translation and stability mRNA in the cell. On a circular DNA template, for instance, plasmid DNA, RNA polymerase produces a long concatameric product which is not suitable for expression in eukaryotic cells. The transcription of plasmid DNA linearized at the end of the 3′ UTR results in normal sized mRNA which is not effective in eukaryotic transfection even if it is polyadenylated after transcription.

[0763] On a linear DNA template, phage T7 RNA polymerase can extend the 3′ end of the transcript beyond the last base of the template (Schenborn and Mierendorf, Nuc Acids Res., 13:6223-36 (1985); Nacheva and Berzal-Herranz, Eur. J. Biochem., 270:1485-65 (2003).

[0764] The conventional method of integration of polyA/T stretches into a DNA template is molecular cloning. However polyA/T sequence integrated into plasmid DNA can cause plasmid instability, which is why plasmid DNA templates obtained from bacterial cells are often highly contaminated with deletions and other aberrations. This makes cloning procedures not only laborious and time consuming but often not reliable. That is why a method which allows construction of DNA templates with polyA/T 3′ stretch without cloning highly desirable.

[0765] The polyA/T segment of the transcriptional DNA template can be produced during PCR by using a reverse primer containing a polyT tail, such as 100T tail (SEQ ID NO: 35) (size can be 50-5000 T (SEQ ID NO: 36)), or after PCR by any other method, including, but not limited to, DNA ligation or in vitro recombination. Poly (A) tails also provide stability to RNAs and reduce their degradation. Generally, the length of a poly (A) tail positively correlates with the stability of the transcribed RNA. In one embodiment, the poly (A) tail is between 100 and 5000 adenosines (SEQ ID NO: 37).

[0766] Poly (A) tails of RNAs can be further extended following in vitro transcription with the use of a poly (A) polymerase, such as E. coli polyA polymerase (E-PAP). In one embodiment, increasing the length of a poly (A) tail from 100 nucleotides to between 300 and 400 nucleotides (SEQ ID NO: 38) results in about a two-fold increase in the translation efficiency of the RNA. Additionally, the attachment of different chemical groups to the 3′ end can increase mRNA stability. Such attachment can contain modified/artificial nucleotides, aptamers and other compounds. For example, ATP analogs can be incorporated into the poly (A) tail using poly (A) polymerase. ATP analogs can further increase the stability of the RNA.

[0767] 5′ caps on also provide stability to RNA molecules. In a preferred embodiment, RNAs produced by the methods disclosed herein include a 5′ cap. The 5′ cap is provided using techniques known in the art and described herein (Cougot, et al., Trends in Biochem. Sci., 29:436-444 (2001); Stepinski, et al., RNA, 7:1468-95 (2001); Elango, et al., Biochim. Biophys. Res. Commun., 330:958-966 (2005)).

[0768] The RNAs produced by the methods disclosed herein can also contain an internal ribosome entry site (IRES) sequence. The IRES sequence may be any viral, chromosomal or artificially designed sequence which initiates cap-independent ribosome binding to mRNA and facilitates the initiation of translation. Any solutes suitable for cell electroporation, which can contain factors facilitating cellular permeability and viability such as sugars, peptides, lipids, proteins, antioxidants, and surfactants can be included.

[0769] RNA can be introduced into target cells using any of a number of different methods, for instance, commercially available methods which include, but are not limited to, electroporation (Amaxa Nucleofector-II (Amaxa Biosystems, Cologne, Germany)), (ECM 830 (BTX) (Harvard Instruments, Boston, Mass.) or the Gene Pulser II (BioRad, Denver, Colo.), Multiporator (Eppendort, Hamburg Germany), cationic liposome mediated transfection using lipofection, polymer encapsulation, peptide mediated transfection, or biolistic particle delivery systems such as “gene guns” (see, for example, Nishikawa, et al. Hum Gene Ther., 12 (8): 861-70 (2001).

### Non-Viral Delivery Methods

[0770] In some aspects, non-viral methods can be used to deliver a nucleic acid encoding an anti-target CAR described herein into a cell or tissue or a subject.

[0771] In some embodiments, the non-viral method includes the use of a transposon (also called a transposable element). In some embodiments, a transposon is a piece of DNA that can insert itself at a location in a genome, for example, a piece of DNA that is capable of self-replicating and inserting its copy into a genome, or a piece of DNA that can be spliced out of a longer nucleic acid and inserted into another place in a genome. For example, a transposon comprises a DNA sequence made up of inverted repeats flanking genes for transposition.

[0772] Exemplary methods of nucleic acid delivery using a transposon include a Sleeping Beauty transposon system (SBTS) and a piggyBac (PB) transposon system. See, e.g., Aronovich et al. Hum. Mol. Genet. 20.R1 (2011): R14-20; Singh et al. Cancer Res. 15 (2008): 2961-2971; Huang et al. Mol. Ther. 16 (2008): 580-589; Grabundzija et al. Mol. Ther. 18 (2010): 1200-1209; Kebriaei et al. Blood. 122.21 (2013): 166; Williams. Molecular Therapy 16.9 (2008): 1515-16; Bell et al. Nat. Protoc. 2.12 (2007): 3153-65; and Ding et al. Cell. 122.3 (2005): 473-83, all of which are incorporated herein by reference.

[0773] The SBTS includes two components: 1) a transposon containing a transgene and 2) a source of transposase enzyme. The transposase can transpose the transposon from a carrier plasmid (or other donor DNA) to a target DNA, such as a host cell chromosome/genome. For example, the transposase binds to the carrier plasmid/donor DNA, cuts the transposon (including transgene(s)) out of the plasmid, and inserts it into the genome of the host cell. See, e.g., Aronovich et al. supra.

[0774] Exemplary transposons include a pT2-based transposon. See, e.g., Grabundzija et al. Nucleic Acids Res. 41.3 (2013): 1829-47; and Singh et al. Cancer Res. 68.8 (2008): 2961-2971, all of which are incorporated herein by reference. Exemplary transposases include a Tc1/mariner-type transposase, e.g., the SB10 transposase or the SB11 transposase (a hyperactive transposase which can be expressed, e.g., from a cytomegalovirus promoter). See, e.g., Aronovich et al.; Kebriaei et al.; and Grabundzija et al., all of which are incorporated herein by reference.

[0775] Use of the SBTS permits efficient integration and expression of a transgene, e.g., a nucleic acid encoding an anti-target CAR described herein. Provided herein are methods of generating a cell, e.g., T cell or NK cell, that stably expresses an anti-target CAR described herein, e.g., using a transposon system such as SBTS.

[0776] In accordance with methods described herein, in some embodiments, one or more nucleic acids, e.g., plasmids, containing the SBTS components are delivered to a cell (e.g., T or NK cell). For example, the nucleic acid(s) are delivered by standard methods of nucleic acid (e.g., plasmid DNA) delivery, e.g., methods described herein, e.g., electroporation, transfection, or lipofection. In some embodiments, the nucleic acid contains a transposon comprising a transgene, e.g., a nucleic acid encoding an anti-target CAR described herein. In some embodiments, the nucleic acid contains a transposon comprising a transgene (e.g., a nucleic acid encoding an anti-target CAR described herein) as well as a nucleic acid sequence encoding a transposase enzyme. In other embodiments, a system with two nucleic acids is provided, e.g., a dual-plasmid system, e.g., where a first plasmid contains a transposon comprising a transgene, and a second plasmid contains a nucleic acid sequence encoding a transposase enzyme. For example, the first and the second nucleic acids are co-delivered into a host cell.

[0777] In some embodiments, cells, e.g., T or NK cells, are generated that express an anti-target CAR described herein by using a combination of gene insertion using the SBTS and genetic editing using a nuclease (e.g., Zinc finger nucleases (ZFNs), Transcription Activator-Like Effector Nucleases (TALENs), the CRISPR/Cas system, or engineered meganuclease re-engineered homing endonucleases).

[0778] In some embodiments, use of a non-viral method of delivery permits reprogramming of cells, e.g., T or NK cells, and direct infusion of the cells into a subject. Advantages of non-viral vectors include but are not limited to the ease and relatively low cost of producing sufficient amounts required to meet a patient population, stability during storage, and lack of immunogenicity.

### Nucleic Acid Constructs Encoding an Anti-Target CAR

[0779] The present invention also provides nucleic acid molecules encoding one or more anti-target CAR constructs described herein. In one aspect, the nucleic acid molecule is provided as a messenger RNA transcript. In one aspect, the nucleic acid molecule is provided as a DNA construct.

[0780] Accordingly, in one aspect, the invention pertains to a nucleic acid molecule encoding an anti-target (CAR), wherein the anti-target CAR comprises a ligand that binds to a target CAR described herein, a transmembrane domain (e.g., a transmembrane domain described herein), and an intracellular signaling domain (e.g., an intracellular signaling domain described herein) comprising a stimulatory domain, e.g., a costimulatory signaling domain (e.g., a costimulatory signaling domain described herein) and/or a primary signaling domain (e.g., a primary signaling domain described herein, e.g., a zeta chain described herein). In one embodiment, the transmembrane domain is transmembrane domain of a protein selected from the group consisting of the alpha, beta or zeta chain of the T-cell receptor, CD28, CD3 epsilon, CD45, CD4, CD5, CD8, CD9, CD16, CD22, CD33, CD37, CD64, CD80, CD86, CD134, CD137 and CD154. In some embodiments, a transmembrane domain may include at least the transmembrane region(s) of, e.g., KIRDS2, OX40, CD2, CD27, LFA-1 (CD11a, CD18), ICOS (CD278), 4-1BB (CD137), GITR, CD40, BAFFR, HVEM (LIGHTR), SLAMF7, NKp80 (KLRF1), NKp44, NKp30, NKp46, CD160, CD19, IL2R beta, IL2R gamma, IL7R a, ITGA1, VLA1, CD49a, ITGA4, IA4, CD49D, ITGA6, VLA-6, CD49f, ITGAD, CD11d, ITGAE, CD103, ITGAL, CD11a, LFA-1, ITGAM, CD11b, ITGAX, CD11c, ITGB1, CD29, ITGB2, CD18, LFA-1, ITGB7, NKG2D, NKG2C, TNFR2, DNAM1 (CD226), SLAMF4 (CD244, 2B4), CD84, CD96 (Tactile), CEACAM1, CRTAM, Ly9 (CD229), CD160 (BY55), PSGL1, CD100 (SEMA4D), SLAMF6 (NTB-A, Ly108), SLAM (SLAMF1, CD150, IPO-3), BLAME (SLAMF8), SELPLG (CD162), LTBR, PAG/Cbp.

[0781] In one embodiment, the transmembrane domain comprises a sequence of SEQ ID NO: 12, or a sequence with 95-99% identity thereof. In one embodiment, the antigen binding domain is connected to the transmembrane domain by a hinge region, e.g., a hinge described herein. In one embodiment, the hinge region comprises SEQ ID NO:403 or SEQ ID NO: 405 or SEQ ID NO:407 or SEQ ID NO:10, or a sequence with 95-99% identity thereof. In one embodiment, the isolated nucleic acid molecule further comprises a sequence encoding a costimulatory domain. In one embodiment, the costimulatory domain is a functional signaling domain of a protein selected from the group consisting of OX40, CD27, CD28, CDS, ICAM-1, LFA-1 (CD11a/CD18), ICOS (CD278), and 4-1BB (CD137). Further examples of such costimulatory molecules include CDS, ICAM-1, GITR, BAFFR, HVEM (LIGHTR), SLAMF7, NKp80 (KLRF1), NKp44, NKp30, NKp46, CD160, CD19, CD4, CD8alpha, CD8beta, IL2R beta, IL2R gamma, IL7R alpha, ITGA4, VLA1, CD49a, ITGA4, IA4, CD49D, ITGA6, VLA-6, CD49f, ITGAD, CD11d, ITGAE, CD103, ITGAL, CD11a, LFA-1, ITGAM, CD11b, ITGAX, CD11c, ITGB1, CD29, ITGB2, CD18, LFA-1, ITGB7, NKG2D, NKG2C, TNFR2, TRANCE/RANKL, DNAMI (CD226), SLAMF4 (CD244, 2B4), CD84, CD96 (Tactile), CEACAMI, CRTAM, Ly9 (CD229), CD160 (BY55), PSGL1, CD100 (SEMA4D), CD69, SLAMF6 (NTB-A, Ly108), SLAM (SLAMF1, CD150, IPO-3), BLAME (SLAMF8), SELPLG (CD162), LTBR, LAT, GADS, SLP-76, and PAG/Cbp. In one embodiment, the costimulatory domain comprises a sequence of SEQ ID NOs: 14, or a sequence with 95-99% identity thereof. In one embodiment, the intracellular signaling domain comprises a functional signaling domain of 4-1BB and a functional signaling domain of CD3 zeta. In one embodiment, the intracellular signaling domain comprises the sequence of any one of SEQ ID NOs: 14, or a sequence with 95-99% identity thereof, and the sequence of SEQ ID NO: 18 or SEQ ID NO:20, or a sequence with 95-99% identity thereof, wherein the sequences comprising the intracellular signaling domain are expressed in the same frame and as a single polypeptide chain.

[0782] In another aspect, the invention pertains to an isolated nucleic acid molecule encoding an anti-target CAR construct comprising a leader sequence of SEQ ID NO: 401, a ligand as described herein, a hinge region of SEQ ID NO:403 or SEQ ID NO:405 or SEQ ID NO: 407 or SEQ ID NO: 10 (or a sequence with 95-99% identity thereof), a transmembrane domain having a sequence of SEQ ID NO: 12 (or a sequence with 95-99% identity thereof), a 4-1BB costimulatory domain having a sequence of SEQ ID NOs: 14 (or a sequence with 95-99% identity thereof), and a CD3 zeta stimulatory domain having a sequence of SEQ ID NO:18 or SEQ ID NO:20 (or a sequence with 95-99% identity thereof).

[0783] In another aspect, the invention pertains to a nucleic acid molecule encoding an anti-target CAR molecule that comprises a ligand that binds to a target CAR, e.g., a ligand comprising a cognate antigen or antibody molecule, e.g., an anti-idiotypic antibody molecule that binds to a target CAR. In an embodiment, the anti-idiotypic antibody comprises the antibody of clone 136.20.1, as disclosed herein and in International Application WO 2014/190273, the entire contents of which are hereby incorporated by reference.

[0784] In one embodiment, the encoded anti-target CAR molecule further comprises a sequence encoding a costimulatory domain. In one embodiment, the costimulatory domain is a functional signaling domain of a protein selected from the group consisting of OX40, CD27, CD28, CDS, ICAM-1, LFA-1 (CD11a/CD18) and 4-1BB (CD137). In one embodiment, the costimulatory domain comprises a sequence of SEQ ID NO: 14. In one embodiment, the transmembrane domain is a transmembrane domain of a protein selected from the group consisting of the alpha, beta or zeta chain of the T-cell receptor, CD28, CD3 epsilon, CD45, CD4, CD5, CD8, CD9, CD16, CD22, CD33, CD37, CD64, CD80, CD86, CD134, CD137 and CD154. In one embodiment, the transmembrane domain comprises a sequence of SEQ ID NO:12. In one embodiment, the intracellular signaling domain comprises a functional signaling domain of 4-1BB and a functional signaling domain of zeta. In one embodiment, the intracellular signaling domain comprises a sequence of SEQ ID NO: 14 and the sequence of SEQ ID NO: 18, wherein the sequences comprising the intracellular signaling domain are expressed in the same frame and as a single polypeptide chain. In one embodiment, the anti-target CAR ligand as described herein is connected to the transmembrane domain by a hinge region. In one embodiment, the hinge region comprises SEQ ID NO:403. In one embodiment, the hinge region comprises SEQ ID NO: 405 or SEQ ID NO:407 or SEQ ID NO: 10.

[0785] The nucleic acid sequences coding for the desired molecules can be obtained using recombinant methods known in the art, such as, for example by screening libraries from cells expressing the gene, by deriving the gene from a vector known to include the same, or by isolating directly from cells and tissues containing the same, using standard techniques. Alternatively, the gene of interest can be produced synthetically, rather than cloned.

[0786] The present invention also provides vectors in which a DNA of the present invention is inserted. Vectors derived from retroviruses such as the lentivirus are suitable tools to achieve long-term gene transfer since they allow long-term, stable integration of a transgene and its propagation in daughter cells. Lentiviral vectors have the added advantage over vectors derived from onco-retroviruses such as murine leukemia viruses in that they can transduce non-proliferating cells, such as hepatocytes. They also have the added advantage of low immunogenicity. A retroviral vector may also be, e.g., a gammaretroviral vector. A gammaretroviral vector may include, e.g., a promoter, a packaging signal (w), a primer binding site (PBS), one or more (e.g., two) long terminal repeats (LTR), and a transgene of interest, e.g., a gene encoding an anti-target CAR. A gammaretroviral vector may lack viral structural gens such as gag, pol, and env. Exemplary gammaretroviral vectors include Murine Leukemia Virus (MLV), Spleen-Focus Forming Virus (SFFV), and Myeloproliferative Sarcoma Virus (MPSV), and vectors derived therefrom. Other gammaretroviral vectors are described, e.g., in Tobias Maetzig et al., “Gammaretroviral Vectors: Biology, Technology and Application” Viruses. 2011 June; 3 (6): 677-713.

[0787] In another embodiment, the vector comprising the nucleic acid encoding the desired anti-target CAR of the invention is an adenoviral vector (A5/35). In another embodiment, the expression of nucleic acids encoding anti-target CARs can be accomplished using of transposons such as sleeping beauty, crisper, CAS9, and zinc finger nucleases. See below June et al. 2009Nature Reviews Immunology 9.10:704-716, is incorporated herein by reference.

[0788] In brief summary, the expression of natural or synthetic nucleic acids encoding anti-target CARs is typically achieved by operably linking a nucleic acid encoding the anti-target CAR polypeptide or portions thereof to a promoter, and incorporating the construct into an expression vector. The vectors can be suitable for replication and integration eukaryotes. Typical cloning vectors contain transcription and translation terminators, initiation sequences, and promoters useful for regulation of the expression of the desired nucleic acid sequence.

[0789] The expression constructs of the present invention may also be used for nucleic acid immunization and gene therapy, using standard gene delivery protocols. Methods for gene delivery are known in the art. See, e.g., U.S. Pat. Nos. 5,399,346, 5,580,859, 5,589,466, incorporated by reference herein in their entireties. In another embodiment, the invention provides a gene therapy vector.

[0790] The nucleic acid can be cloned into a number of types of vectors. For example, the nucleic acid can be cloned into a vector including, but not limited to a plasmid, a phagemid, a phage derivative, an animal virus, and a cosmid. Vectors of particular interest include expression vectors, replication vectors, probe generation vectors, and sequencing vectors.

[0791] Further, the expression vector may be provided to a cell in the form of a viral vector. Viral vector technology is well known in the art and is described, for example, in Sambrook et al., 2012, MOLECULAR CLONING: A LABORATORY MANUAL, volumes 1-4, Cold Spring Harbor Press, NY), and in other virology and molecular biology manuals. Viruses, which are useful as vectors include, but are not limited to, retroviruses, adenoviruses, adeno-associated viruses, herpes viruses, and lentiviruses. In general, a suitable vector contains an origin of replication functional in at least one organism, a promoter sequence, convenient restriction endonuclease sites, and one or more selectable markers, (e.g., WO 01/96584; WO 01/29058; and U.S. Pat. No. 6,326,193).

[0792] A number of viral based systems have been developed for gene transfer into mammalian cells. For example, retroviruses provide a convenient platform for gene delivery systems. A selected gene can be inserted into a vector and packaged in retroviral particles using techniques known in the art. The recombinant virus can then be isolated and delivered to cells of the subject either in vivo or ex vivo. A number of retroviral systems are known in the art. In some embodiments, adenovirus vectors are used. A number of adenovirus vectors are known in the art. In one embodiment, lentivirus vectors are used.

[0793] Additional promoter elements, e.g., enhancers, regulate the frequency of transcriptional initiation. Typically, these are located in the region 30-110 bp upstream of the start site, although a number of promoters have been shown to contain functional elements downstream of the start site as well. The spacing between promoter elements frequently is flexible, so that promoter function is preserved when elements are inverted or moved relative to one another. In the thymidine kinase (tk) promoter, the spacing between promoter elements can be increased to 50 bp apart before activity begins to decline. Depending on the promoter, it appears that individual elements can function either cooperatively or independently to activate transcription. Exemplary promoters include the CMV IE gene, EF-1a, ubiquitin C, or phosphoglycerokinase (PGK) promoters.

[0794] An example of a promoter that is capable of expressing an anti-target CAR encoding nucleic acid molecule in a mammalian T cell is the EF1a promoter. The native EF1a promoter drives expression of the alpha subunit of the elongation factor-1 complex, which is responsible for the enzymatic delivery of aminoacyl tRNAs to the ribosome. The EF1a promoter has been extensively used in mammalian expression plasmids and has been shown to be effective in driving anti-target CAR expression from nucleic acid molecules cloned into a lentiviral vector. See, e.g., Milone et al., Mol. Ther. 17 (8): 1453-1464 (2009). In one aspect, the EF1a promoter comprises the sequence provided as SEQ ID NO:400.

[0795] Another example of a promoter is the immediate early cytomegalovirus (CMV) promoter sequence. This promoter sequence is a strong constitutive promoter sequence capable of driving high levels of expression of any polynucleotide sequence operatively linked thereto. However, other constitutive promoter sequences may also be used, including, but not limited to the simian virus 40 (SV40) early promoter, mouse mammary tumor virus (MMTV), human immunodeficiency virus (HIV) long terminal repeat (LTR) promoter, MoMuLV promoter, an avian leukemia virus promoter, an Epstein-Barr virus immediate early promoter, a Rous sarcoma virus promoter, as well as human gene promoters such as, but not limited to, the actin promoter, the myosin promoter, the elongation factor-1 promoter, the hemoglobin promoter, and the creatine kinase promoter. Further, the invention should not be limited to the use of constitutive promoters. Inducible promoters are also contemplated as part of the invention. The use of an inducible promoter provides a molecular switch capable of turning on expression of the polynucleotide sequence which it is operatively linked when such expression is desired, or turning off the expression when expression is not desired. Examples of inducible promoters include, but are not limited to a metallothionine promoter, a glucocorticoid promoter, a progesterone promoter, and a tetracycline promoter.

[0796] A vector may also include, e.g., a signal sequence to facilitate secretion, a polyadenylation signal and transcription terminator (e.g., from Bovine Growth Hormone (BGH) gene), an element allowing episomal replication and replication in prokaryotes (e.g. SV40 origin and ColE1 or others known in the art) and/or elements to allow selection (e.g., ampicillin resistance gene and/or zeocin marker).

[0797] In order to assess the expression of an anti-target CAR polypeptide or portions thereof, the expression vector to be introduced into a cell can also contain either a selectable marker gene or a reporter gene or both to facilitate identification and selection of expressing cells from the population of cells sought to be transfected or infected through viral vectors. In other aspects, the selectable marker may be carried on a separate piece of DNA and used in a co-transfection procedure. Both selectable markers and reporter genes may be flanked with appropriate regulatory sequences to enable expression in the host cells. Useful selectable markers include, for example, antibiotic-resistance genes, such as neo and the like.

[0798] Reporter genes are used for identifying potentially transfected cells and for evaluating the functionality of regulatory sequences. In general, a reporter gene is a gene that is not present in or expressed by the recipient organism or tissue and that encodes a polypeptide whose expression is manifested by some easily detectable property, e.g., enzymatic activity. Expression of the reporter gene is assayed at a suitable time after the DNA has been introduced into the recipient cells. Suitable reporter genes may include genes encoding luciferase, beta-galactosidase, chloramphenicol acetyl transferase, secreted alkaline phosphatase, or the green fluorescent protein gene (e.g., Ui-Tei et al., 2000 FEBS Letters 479:79-82). Suitable expression systems are well known and may be prepared using known techniques or obtained commercially. In general, the construct with the minimal 5′ flanking region showing the highest level of expression of reporter gene is identified as the promoter. Such promoter regions may be linked to a reporter gene and used to evaluate agents for the ability to modulate promoter-driven transcription.

[0799] Methods of introducing and expressing genes into a cell are known in the art. In the context of an expression vector, the vector can be readily introduced into a host cell, e.g., mammalian, bacterial, yeast, or insect cell by any method in the art. For example, the expression vector can be transferred into a host cell by physical, chemical, or biological means.

[0800] Physical methods for introducing a polynucleotide into a host cell include calcium phosphate precipitation, lipofection, particle bombardment, microinjection, electroporation, and the like. Methods for producing cells comprising vectors and/or exogenous nucleic acids are well-known in the art. See, for example, Sambrook et al., 2012, MOLECULAR CLONING: A LABORATORY MANUAL, volumes 1-4, Cold Spring Harbor Press, NY). A preferred method for the introduction of a polynucleotide into a host cell is calcium phosphate transfection

[0801] Biological methods for introducing a polynucleotide of interest into a host cell include the use of DNA and RNA vectors. Viral vectors, and especially retroviral vectors, have become the most widely used method for inserting genes into mammalian, e.g., human cells. Other viral vectors can be derived from lentivirus, poxviruses, herpes simplex virus I, adenoviruses and adeno-associated viruses, and the like. See, for example, U.S. Pat. Nos. 5,350,674 and 5,585,362.

[0802] Chemical means for introducing a polynucleotide into a host cell include colloidal dispersion systems, such as macromolecule complexes, nanocapsules, microspheres, beads, and lipid-based systems including oil-in-water emulsions, micelles, mixed micelles, and liposomes. An exemplary colloidal system for use as a delivery vehicle in vitro and in vivo is a liposome (e.g., an artificial membrane vesicle). Other methods of state-of-the-art targeted delivery of nucleic acids are available, such as delivery of polynucleotides with targeted nanoparticles or other suitable sub-micron sized delivery system.

[0803] In the case where a non-viral delivery system is utilized, an exemplary delivery vehicle is a liposome. The use of lipid formulations is contemplated for the introduction of the nucleic acids into a host cell (in vitro, ex vivo or in vivo). In another aspect, the nucleic acid may be associated with a lipid. The nucleic acid associated with a lipid may be encapsulated in the aqueous interior of a liposome, interspersed within the lipid bilayer of a liposome, attached to a liposome via a linking molecule that is associated with both the liposome and the oligonucleotide, entrapped in a liposome, complexed with a liposome, dispersed in a solution containing a lipid, mixed with a lipid, combined with a lipid, contained as a suspension in a lipid, contained or complexed with a micelle, or otherwise associated with a lipid. Lipid, lipid/DNA or lipid/expression vector associated compositions are not limited to any particular structure in solution. For example, they may be present in a bilayer structure, as micelles, or with a “collapsed” structure. They may also simply be interspersed in a solution, possibly forming aggregates that are not uniform in size or shape. Lipids are fatty substances which may be naturally occurring or synthetic lipids. For example, lipids include the fatty droplets that naturally occur in the cytoplasm as well as the class of compounds which contain long-chain aliphatic hydrocarbons and their derivatives, such as fatty acids, alcohols, amines, amino alcohols, and aldehydes.

[0804] Lipids suitable for use can be obtained from commercial sources. For example, dimyristyl phosphatidylcholine (“DMPC”) can be obtained from Sigma, St. Louis, MO; dicetyl phosphate (“DCP”) can be obtained from K & K Laboratories (Plainview, NY); cholesterol (“Choi”) can be obtained from Calbiochem-Behring; dimyristyl phosphatidylglycerol (“DMPG”) and other lipids may be obtained from Avanti Polar Lipids, Inc. (Birmingham, AL). Stock solutions of lipids in chloroform or chloroform/methanol can be stored at about-20° C. Chloroform is used as the only solvent since it is more readily evaporated than methanol. “Liposome” is a generic term encompassing a variety of single and multilamellar lipid vehicles formed by the generation of enclosed lipid bilayers or aggregates. Liposomes can be characterized as having vesicular structures with a phospholipid bilayer membrane and an inner aqueous medium. Multilamellar liposomes have multiple lipid layers separated by aqueous medium. They form spontaneously when phospholipids are suspended in an excess of aqueous solution. The lipid components undergo self-rearrangement before the formation of closed structures and entrap water and dissolved solutes between the lipid bilayers (Ghosh et al., 1991 Glycobiology 5:505-10). However, compositions that have different structures in solution than the normal vesicular structure are also encompassed. For example, the lipids may assume a micellar structure or merely exist as nonuniform aggregates of lipid molecules. Also contemplated are lipofectamine-nucleic acid complexes.

[0805] Regardless of the method used to introduce exogenous nucleic acids into a host cell or otherwise expose a cell to the inhibitor of the present invention, in order to confirm the presence of the recombinant DNA sequence in the host cell, a variety of assays may be performed. Such assays include, for example, “molecular biological” assays well known to those of skill in the art, such as Southern and Northern blotting, RT-PCR and PCR; “biochemical” assays, such as detecting the presence or absence of a particular peptide, e.g., by immunological means (ELISAs and Western blots) or by assays described herein to identify agents falling within the scope of the invention.

[0806] The present invention further provides a vector comprising an anti-target CAR encoding nucleic acid molecule. In one aspect, an anti-target CAR vector can be directly transduced into a cell, e.g., a T cell or a NK cell. In one aspect, the vector is a cloning or expression vector, e.g., a vector including, but not limited to, one or more plasmids (e.g., expression plasmids, cloning vectors, minicircles, minivectors, double minute chromosomes), retroviral and lentiviral vector constructs. In one aspect, the vector is capable of expressing the anti-target CAR construct in mammalian immune effector cells (e.g., T cells, NK cells). In one aspect, the mammalian T cell is a human T cell. In one aspect, the mammalian NK cell is a human NK cell.

### Sources of Cells

[0807] Prior to expansion and genetic modification or other modification, a source of cells, e.g., T cells or natural killer (NK) cells, can be obtained from a subject. The term “subject” is intended to include living organisms in which an immune response can be elicited (e.g., mammals). Examples of subjects include humans, monkeys, chimpanzees, dogs, cats, mice, rats, and transgenic species thereof. T cells can be obtained from a number of sources, including peripheral blood mononuclear cells, bone marrow, lymph node tissue, cord blood, thymus tissue, tissue from a site of infection, ascites, pleural effusion, spleen tissue, and tumors.

[0808] In certain aspects of the present disclosure, immune effector cells, e.g., T cells, can be obtained from a unit of blood collected from a subject using any number of techniques known to the skilled artisan, such as Ficoll™ separation. In one preferred aspect, cells from the circulating blood of an individual are obtained by apheresis. The apheresis product typically contains lymphocytes, including T cells, monocytes, granulocytes, B cells, other nucleated white blood cells, red blood cells, and platelets. In one aspect, the cells collected by apheresis may be washed to remove the plasma fraction and, optionally, to place the cells in an appropriate buffer or media for subsequent processing steps. In one embodiment, the cells are washed with phosphate buffered saline (PBS). In an alternative embodiment, the wash solution lacks calcium and may lack magnesium or may lack many if not all divalent cations.

[0809] Initial activation steps in the absence of calcium can lead to magnified activation. As those of ordinary skill in the art would readily appreciate a washing step may be accomplished by methods known to those in the art, such as by using a semi-automated “flow-through” centrifuge (for example, the Cobe 2991 cell processor, the Baxter CytoMate, or the Haemonetics Cell Saver 5) according to the manufacturer's instructions. After washing, the cells may be resuspended in a variety of biocompatible buffers, such as, for example, Ca-free, Mg-free PBS, PlasmaLyte A, or other saline solution with or without buffer. Alternatively, the undesirable components of the apheresis sample may be removed and the cells directly resuspended in culture media.

[0810] It is recognized that the methods of the application can utilize culture media conditions comprising 5% or less, for example 2%, human AB serum, and employ known culture media conditions and compositions, for example those described in Smith et al., “Ex vivo expansion of human T cells for adoptive immunotherapy using the novel Xeno-free CTS Immune Cell Serum Replacement” Clinical & Translational Immunology (2015) 4, e31; doi: 10.1038/cti.2014.31.

[0811] In one aspect, T cells are isolated from peripheral blood lymphocytes by lysing the red blood cells and depleting the monocytes, for example, by centrifugation through a PERCOLL™ gradient or by counterflow centrifugal elutriation.

[0812] The methods described herein can include, e.g., selection of a specific subpopulation of immune effector cells, e.g., T cells, that are a T regulatory cell-depleted population, CD25+depleted cells, using, e.g., a negative selection technique, e.g., described herein. Preferably, the population of T regulatory depleted cells contains less than 30%, 25%, 20%, 15%, 10%, 5%, 4%, 3%, 2%, 1% of CD25+ cells.

[0813] In one embodiment, T regulatory cells, e.g., CD25+ T cells, are removed from the population using an anti-CD25 antibody, or fragment thereof, or a CD25-binding ligand, IL-2. In one embodiment, the anti-CD25 antibody, or fragment thereof, or CD25-binding ligand is conjugated to a substrate, e.g., a bead, or is otherwise coated on a substrate, e.g., a bead. In one embodiment, the anti-CD25 antibody, or fragment thereof, is conjugated to a substrate as described herein.

[0814] In one embodiment, the T regulatory cells, e.g., CD25+ T cells, are removed from the population using CD25 depletion reagent from Miltenyi™. In one embodiment, the ratio of cells to CD25 depletion reagent is 1e7 cells to 20 uL, or 1e7 cells to15 uL, or 1e7 cells to 10 uL, or 1e7 cells to 5 uL, or 1e7 cells to 2.5 uL, or 1e7 cells to 1.25 uL. In one embodiment, e.g., for T regulatory cells, e.g., CD25+depletion, greater than 500 million cells/ml is used. In a further aspect, a concentration of cells of 600, 700, 800, or 900 million cells/ml is used.

[0815] In one embodiment, the population of immune effector cells to be depleted includes about 6×10⁹ CD25+ T cells. In other aspects, the population of immune effector cells to be depleted include about 1×10⁹ to 1×10¹⁰ CD25+ T cell, and any integer value in between. In one embodiment, the resulting population T regulatory depleted cells has 2×10⁹ T regulatory cells, e.g., CD25+ cells, or less (e.g., 1×10⁹, 5×10⁸, 1×10⁸, 5×10⁷, 1×10⁷, or less CD25+ cells).

[0816] In one embodiment, the T regulatory cells, e.g., CD25+ cells, are removed from the population using the CliniMAC system with a depletion tubing set, such as, e.g., tubing 162-01. In one embodiment, the CliniMAC system is run on a depletion setting such as, e.g., DEPLETION2.1.

[0817] Without wishing to be bound by a particular theory, decreasing the level of negative regulators of immune cells (e.g., decreasing the number of unwanted immune cells, e.g., TREG cells), in a subject prior to apheresis or during manufacturing of a CAR-expressing cell product can reduce the risk of subject relapse. For example, methods of depleting TREG cells are known in the art. Methods of decreasing TREG cells include, but are not limited to, cyclophosphamide, anti-GITR antibody (an anti-GITR antibody described herein), CD25-depletion, and combinations thereof.

[0818] In some embodiments, the manufacturing methods comprise reducing the number of (e.g., depleting) TREG cells prior to manufacturing of the anti-target CAR-expressing cell. For example, manufacturing methods comprise contacting the sample, e.g., the apheresis sample, with an anti-GITR antibody and/or an anti-CD25 antibody (or fragment thereof, or a CD25-binding ligand), e.g., to deplete TREG cells prior to manufacturing of the anti-target CAR-expressing cell (e.g., T cell, NK cell) product.

[0819] In an embodiment, a subject is pre-treated with one or more therapies that reduce TREG cells prior to collection of cells for anti-target CAR-expressing cell product manufacturing, thereby reducing the risk of subject relapse to anti-target CAR-expressing cell treatment. In an embodiment, methods of decreasing TREG cells include, but are not limited to, administration to the subject of one or more of cyclophosphamide, anti-GITR antibody, CD25-depletion, or a combination thereof. Administration of one or more of cyclophosphamide, anti-GITR antibody, CD25-depletion, or a combination thereof, can occur before, during or after an infusion of the anti-target CAR-expressing cell product.

[0820] In an embodiment, a subject is pre-treated with cyclophosphamide prior to collection of cells for anti-target CAR-expressing cell product manufacturing, thereby reducing the risk of subject relapse to CAR-expressing cell treatment. In an embodiment, a subject is pre-treated with an anti-GITR antibody prior to collection of cells for anti-target CAR-expressing cell product manufacturing, thereby reducing the risk of subject relapse to anti-target CAR-expressing cell treatment.

[0821] In one embodiment, the population of cells to be removed are neither the regulatory T cells or tumor cells, but cells that otherwise negatively affect the expansion and/or function of CART cells, e.g. cells expressing CD14, CD11b, CD33, CD15, or other markers expressed by potentially immune suppressive cells. In one embodiment, such cells are envisioned to be removed concurrently with regulatory T cells and/or tumor cells, or following said depletion, or in another order.

[0822] The methods described herein can include more than one selection step, e.g., more than one depletion step. Enrichment of a T cell population by negative selection can be accomplished, e.g., with a combination of antibodies directed to surface markers unique to the negatively selected cells. One method is cell sorting and/or selection via negative magnetic immunoadherence or flow cytometry that uses a cocktail of monoclonal antibodies directed to cell surface markers present on the cells negatively selected. For example, to enrich for CD4+ cells by negative selection, a monoclonal antibody cocktail can include antibodies to CD14, CD20, CD11b, CD16, HLA-DR, and CD8.

[0823] The methods described herein can further include removing cells from the population which express a tumor antigen, e.g., a tumor antigen that does not comprise CD25, e.g., CD19, CD30, CD38, CD123, CD20, CD14 or CD11b, to thereby provide a population of T regulatory depleted, e.g., CD25+depleted, and tumor antigen depleted cells that are suitable for expression of a CAR, e.g., a CAR described herein. In one embodiment, tumor antigen expressing cells are removed simultaneously with the T regulatory, e.g., CD25+ cells. For example, an anti-CD25 antibody, or fragment thereof, and an anti-tumor antigen antibody, or fragment thereof, can be attached to the same substrate, e.g., bead, which can be used to remove the cells or an anti-CD25 antibody, or fragment thereof, or the anti-tumor antigen antibody, or fragment thereof, can be attached to separate beads, a mixture of which can be used to remove the cells. In other embodiments, the removal of T regulatory cells, e.g., CD25+ cells, and the removal of the tumor antigen expressing cells is sequential, and can occur, e.g., in either order.

[0824] Also provided are methods that include removing cells from the population which express a check point inhibitor, e.g., a check point inhibitor described herein, e.g., one or more of PD1+ cells, LAG3+ cells, and TIM3+ cells, to thereby provide a population of T regulatory depleted, e.g., CD25+depleted cells, and check point inhibitor depleted cells, e.g., PD1+, LAG3+ and/or TIM3+depleted cells. Exemplary check point inhibitors include B7-H1, B7-1, CD160, P1H, 2B4, PD1, TIM3, CEACAM (e.g., CEACAM-1, CEACAM-3 and/or CEACAM-5), LAG3, TIGIT, CTLA-4, BTLA and LAIR1. In one embodiment, check point inhibitor expressing cells are removed simultaneously with the T regulatory, e.g., CD25+ cells. For example, an anti-CD25 antibody, or fragment thereof, and an anti-check point inhibitor antibody, or fragment thereof, can be attached to the same bead which can be used to remove the cells, or an anti-CD25 antibody, or fragment thereof, and the anti-check point inhibitor antibody, or fragment there, can be attached to separate beads, a mixture of which can be used to remove the cells. In other embodiments, the removal of T regulatory cells, e.g., CD25+ cells, and the removal of the check point inhibitor expressing cells is sequential, and can occur, e.g., in either order.

[0825] Methods described herein can include a positive selection step. For example, T cells can isolated by incubation with anti-CD3/anti-CD28 (e.g., 3×28)-conjugated beads, such as DYNABEADS® M-450 CD3/CD28 T, for a time period sufficient for positive selection of the desired T cells. In one embodiment, the time period is about 30 minutes. In a further embodiment, the time period ranges from 30 minutes to 36 hours or longer and all integer values there between. In a further embodiment, the time period is at least 1, 2, 3, 4, 5, or 6 hours. In yet another embodiment, the time period is 10 to 24 hours, e.g., 24 hours. Longer incubation times may be used to isolate T cells in any situation where there are few T cells as compared to other cell types, such in isolating tumor infiltrating lymphocytes (TIL) from tumor tissue or from immunocompromised individuals. Further, use of longer incubation times can increase the efficiency of capture of CD8+ T cells. Thus, by simply shortening or lengthening the time T cells are allowed to bind to the CD3/CD28 beads and/or by increasing or decreasing the ratio of beads to T cells (as described further herein), subpopulations of T cells can be preferentially selected for or against at culture initiation or at other time points during the process. Additionally, by increasing or decreasing the ratio of anti-CD3 and/or anti-CD28 antibodies on the beads or other surface, subpopulations of T cells can be preferentially selected for or against at culture initiation or at other desired time points.

[0826] In one embodiment, a T cell population can be selected that expresses one or more of IFN-^{γ}, TNFα, IL-17A, IL-2, IL-3, IL-4, GM-CSF, IL-10, IL-13, granzyme B, and perforin, or other appropriate molecules, e.g., other cytokines. Methods for screening for cell expression can be determined, e.g., by the methods described in PCT Publication No.: WO 2013/126712.

[0827] For isolation of a desired population of cells by positive or negative selection, the concentration of cells and surface (e.g., particles such as beads) can be varied. In certain aspects, it may be desirable to significantly decrease the volume in which beads and cells are mixed together (e.g., increase the concentration of cells), to ensure maximum contact of cells and beads. For example, in one aspect, a concentration of 10 billion cells/ml, 9 billion/ml, 8 billion/ml, 7 billion/ml, 6 billion/ml, or 5 billion/ml is used. In one aspect, a concentration of 1 billion cells/ml is used. In yet one aspect, a concentration of cells from 75, 80, 85, 90, 95, or 100 million cells/ml is used. In further aspects, concentrations of 125 or 150 million cells/ml can be used.

[0828] Using high concentrations can result in increased cell yield, cell activation, and cell expansion. Further, use of high cell concentrations allows more efficient capture of cells that may weakly express target antigens of interest, such as CD28-negative T cells, or from samples where there are many tumor cells present (e.g., leukemic blood, tumor tissue, etc.). Such populations of cells may have therapeutic value and would be desirable to obtain. For example, using high concentration of cells allows more efficient selection of CD8+ T cells that normally have weaker CD28 expression.

[0829] In a related aspect, it may be desirable to use lower concentrations of cells. By significantly diluting the mixture of T cells and surface (e.g., particles such as beads), interactions between the particles and cells is minimized. This selects for cells that express high amounts of desired antigens to be bound to the particles. For example, CD4+ T cells express higher levels of CD28 and are more efficiently captured than CD8+ T cells in dilute concentrations. In one aspect, the concentration of cells used is 5×10⁶/ml. In other aspects, the concentration used can be from about 1×10⁵/ml to 1×10⁶/ml, and any integer value in between.

[0830] In other aspects, the cells may be incubated on a rotator for varying lengths of time at varying speeds at either 2-10° C. or at room temperature.

[0831] T cells for stimulation can also be frozen after a washing step. Wishing not to be bound by theory, the freeze and subsequent thaw step provides a more uniform product by removing granulocytes and to some extent monocytes in the cell population. After the washing step that removes plasma and platelets, the cells may be suspended in a freezing solution. While many freezing solutions and parameters are known in the art and will be useful in this context, one method involves using PBS containing 20% DMSO and 8% human serum albumin, or culture media containing 10% Dextran 40 and 5% Dextrose, 20% Human Serum Albumin and 7.5% DMSO, or 31.25% Plasmalyte-A, 31.25% Dextrose 5%, 0.45% NaCl, 10% Dextran 40 and 5% Dextrose, 20% Human Serum Albumin, and 7.5% DMSO or other suitable cell freezing media containing for example, Hespan and PlasmaLyte A, the cells then are frozen to −80° C. at a rate of 1° per minute and stored in the vapor phase of a liquid nitrogen storage tank. Other methods of controlled freezing may be used as well as uncontrolled freezing immediately at −20° C. or in liquid nitrogen.

[0832] In certain aspects, cryopreserved cells are thawed and washed as described herein and allowed to rest for one hour at room temperature prior to activation using the methods of the present invention.

[0833] Also contemplated in the context of the invention is the collection of blood samples or apheresis product from a subject at a time period prior to when the expanded cells as described herein might be needed. As such, the source of the cells to be expanded can be collected at any time point necessary, and desired cells, such as T cells, isolated and frozen for later use in immune effector cell therapy for any number of diseases or conditions that would benefit from immune effector cell therapy, such as those described herein. In one aspect a blood sample or an apheresis is taken from a generally healthy subject. In certain aspects, a blood sample or an apheresis is taken from a generally healthy subject who is at risk of developing a disease, but who has not yet developed a disease, and the cells of interest are isolated and frozen for later use. In certain aspects, the T cells may be expanded, frozen, and used at a later time. In certain aspects, samples are collected from a patient shortly after diagnosis of a particular disease as described herein but prior to any treatments. In a further aspect, the cells are isolated from a blood sample or an apheresis from a subject prior to any number of relevant treatment modalities, including but not limited to treatment with agents such as natalizumab, efalizumab, antiviral agents, chemotherapy, radiation, immunosuppressive agents, such as cyclosporin, azathioprine, methotrexate, mycophenolate, and FK506, antibodies, or other immunoablative agents such as CAMPATH, anti-CD3 antibodies, cytoxan, fludarabine, cyclosporin, FK506, rapamycin, mycophenolic acid, steroids, FR901228, and irradiation.

[0834] In a further aspect of the present invention, T cells are obtained from a patient directly following treatment that leaves the subject with functional T cells. In this regard, it has been observed that following certain cancer treatments, in particular treatments with drugs that damage the immune system, shortly after treatment during the period when patients would normally be recovering from the treatment, the quality of T cells obtained may be optimal or improved for their ability to expand ex vivo. Likewise, following ex vivo manipulation using the methods described herein, these cells may be in a preferred state for enhanced engraftment and in vivo expansion. Thus, it is contemplated within the context of the present invention to collect blood cells, including T cells, dendritic cells, or other cells of the hematopoietic lineage, during this recovery phase. Further, in certain aspects, mobilization (for example, mobilization with GM-CSF) and conditioning regimens can be used to create a condition in a subject wherein repopulation, recirculation, regeneration, and/or expansion of particular cell types is favored, especially during a defined window of time following therapy. Illustrative cell types include T cells, B cells, dendritic cells, and other cells of the immune system.

[0835] In one embodiment, the immune effector cells expressing an anti-target CAR molecule, e.g., an anti-target CAR molecule described herein, are obtained from a subject that has received a low, immune enhancing dose of an mTOR inhibitor. In an embodiment, the population of immune effector cells, e.g., T cells, to be engineered to express an anti-target CAR, are harvested after a sufficient time, or after sufficient dosing of the low, immune enhancing, dose of an mTOR inhibitor, such that the level of PD1 negative immune effector cells, e.g., T cells, or the ratio of PD1 negative immune effector cells, e.g., T cells/PD1 positive immune effector cells, e.g., T cells, in the subject or harvested from the subject has been, at least transiently, increased.

[0836] In other embodiments, population of immune effector cells, e.g., T cells, which have, or will be engineered to express an anti-target CAR, can be treated ex vivo by contact with an amount of an mTOR inhibitor that increases the number of PD1 negative immune effector cells, e.g., T cells or increases the ratio of PD1 negative immune effector cells, e.g., T cells/PD1 positive immune effector cells, e.g., T cells.

[0837] In one embodiment, a T cell population is diacylglycerol kinase (DGK)-deficient. DGK-deficient cells include cells that do not express DGK RNA or protein, or have reduced or inhibited DGK activity. DGK-deficient cells can be generated by genetic approaches, e.g., administering RNA-interfering agents, e.g., siRNA, shRNA, miRNA, to reduce or prevent DGK expression. Alternatively, DGK-deficient cells can be generated by treatment with DGK inhibitors described herein.

[0838] In one embodiment, a T cell population is Ikaros-deficient. Ikaros-deficient cells include cells that do not express Ikaros RNA or protein, or have reduced or inhibited Ikaros activity, Ikaros-deficient cells can be generated by genetic approaches, e.g., administering RNA-interfering agents, e.g., siRNA, shRNA, miRNA, to reduce or prevent Ikaros expression. Alternatively, Ikaros-deficient cells can be generated by treatment with Ikaros inhibitors, e.g., lenalidomide.

[0839] In embodiments, a T cell population is DGK-deficient and Ikaros-deficient, e.g., does not express DGK and Ikaros, or has reduced or inhibited DGK and Ikaros activity. Such DGK and Ikaros-deficient cells can be generated by any of the methods described herein.

[0840] In an embodiment, the NK cells are obtained from the subject. In another embodiment, the NK cells are an NK cell line, e.g., NK-92 cell line (Conkwest).

### Allogeneic CAR

[0841] In embodiments described herein, the immune effector cell can be an allogeneic immune effector cell, e.g., T cell or NK cell. For example, the cell can be an allogeneic T cell, e.g., an allogeneic T cell lacking expression of a functional T cell receptor (TCR) and/or human leukocyte antigen (HLA), e.g., HLA class I and/or HLA class II.

[0842] A T cell lacking a functional TCR can be, e.g., engineered such that it does not express any functional TCR on its surface, engineered such that it does not express one or more subunits that comprise a functional TCR or engineered such that it produces very little functional TCR on its surface. Alternatively, the T cell can express a substantially impaired TCR, e.g., by expression of mutated or truncated forms of one or more of the subunits of the TCR. The term “substantially impaired TCR” means that this TCR will not elicit an adverse immune reaction in a host.

[0843] A T cell described herein can be, e.g., engineered such that it does not express a functional HLA on its surface. For example, a T cell described herein, can be engineered such that cell surface expression HLA, e.g., HLA class 1 and/or HLA class II, is downregulated.

[0844] In some embodiments, the T cell can lack a functional TCR and a functional HLA, e.g., HLA class I and/or HLA class II.

[0845] Modified T cells that lack expression of a functional TCR and/or HLA can be obtained by any suitable means, including a knock out or knock down of one or more subunit of TCR or HLA. For example, the T cell can include a knock down of TCR and/or HLA using siRNA, shRNA, clustered regularly interspaced short palindromic repeats (CRISPR) transcription-activator like effector nuclease (TALEN), or zinc finger endonuclease (ZFN).

[0846] In some embodiments, the allogeneic cell can be a cell which does not express or expresses at low levels an inhibitory molecule, e.g. by any method described herein. For example, the cell can be a cell that does not express or expresses at low levels an inhibitory molecule, e.g., that can decrease the ability of an anti-target CAR-expressing cell to mount an immune effector response. Examples of inhibitory molecules include PD1, PD-L1, CTLA4, TIM3, CEACAM (e.g., CEACAM-1, CEACAM-3 and/or CEACAM-5), LAG3, VISTA, BTLA, TIGIT, LAIR1, CD160, 2B4 and TGF beta. Inhibition of an inhibitory molecule, e.g., by inhibition at the DNA, RNA or protein level, can optimize a CAR-expressing cell performance. In embodiments, an inhibitory nucleic acid, e.g., an inhibitory nucleic acid, e.g., a dsRNA, e.g., an siRNA or shRNA, a clustered regularly interspaced short palindromic repeats (CRISPR), a transcription-activator like effector nuclease (TALEN), or a zinc finger endonuclease (ZFN), e.g., as described herein, can be used.

siRNA and shRNA to Inhibit TCR or HLA

[0847] In some embodiments, TCR expression and/or HLA expression can be inhibited using siRNA or shRNA that targets a nucleic acid encoding a TCR and/or HLA in a T cell.

[0848] Expression of siRNA and shRNAs in T cells can be achieved using any conventional expression system, e.g., such as a lentiviral expression system.

[0849] Exemplary shRNAs that downregulate expression of components of the TCR are described, e.g., in US Publication No.: 2012/0321667. Exemplary siRNA and shRNA that downregulate expression of HLA class I and/or HLA class II genes are described, e.g., in U.S. publication No.: US 2007/0036773.

### CRISPR to Inhibit TCR or HLA

[0850] “CRISPR” or “CRISPR to TCR and/or HLA” or “CRISPR to inhibit TCR and/or HLA” as used herein refers to a set of clustered regularly interspaced short palindromic repeats, or a system comprising such a set of repeats. “Cas”, as used herein, refers to a CRISPR-associated protein. A “CRISPR/Cas” system refers to a system derived from CRISPR and Cas which can be used to silence or mutate a TCR and/or HLA gene.

[0851] Naturally-occurring CRISPR/Cas systems are found in approximately 40% of sequenced eubacteria genomes and 90% of sequenced archaea. Grissa et al. (2007) BMC Bioinformatics 8:172. This system is a type of prokaryotic immune system that confers resistance to foreign genetic elements such as plasmids and phages and provides a form of acquired immunity. Barrangou et al. (2007) Science 315:1709-1712; Marragini et al. (2008) Science 322:1843-1845.

[0852] The CRISPR/Cas system has been modified for use in gene editing (silencing, enhancing or changing specific genes) in eukaryotes such as mice or primates. Wiedenheft et al. (2012) Nature 482:331-8. This is accomplished by introducing into the eukaryotic cell a plasmid containing a specifically designed CRISPR and one or more appropriate Cas.

[0853] The CRISPR sequence, sometimes called a CRISPR locus, comprises alternating repeats and spacers. In a naturally-occurring CRISPR, the spacers usually comprise sequences foreign to the bacterium such as a plasmid or phage sequence; in the TCR and/or HLA CRISPR/Cas system, the spacers are derived from the TCR or HLA gene sequence.

[0854] RNA from the CRISPR locus is constitutively expressed and processed by Cas proteins into small RNAs. These comprise a spacer flanked by a repeat sequence. The RNAs guide other Cas proteins to silence exogenous genetic elements at the RNA or DNA level. Horvath et al. (2010) Science 327:167-170; Makarova et al. (2006) Biology Direct 1:7. The spacers thus serve as templates for RNA molecules, analogously to siRNAs. Pennisi (2013) Science 341:833-836.

[0855] As these naturally occur in many different types of bacteria, the exact arrangements of the CRISPR and structure, function and number of Cas genes and their product differ somewhat from species to species. Haft et al. (2005) PLOS Comput. Biol. 1: e60; Kunin et al. (2007) Genome Biol. 8: R61; Mojica et al. (2005) J. Mol. Evol. 60:174-182; Bolotin et al. (2005) Microbiol. 151:2551-2561; Pourcel et al. (2005) Microbiol. 151:653-663; and Stern et al. (2010) Trends. Genet. 28:335-340. For example, the Cse (Cas subtype, E. coli) proteins (e.g., CasA) form a functional complex, Cascade, that processes CRISPR RNA transcripts into spacer-repeat units that Cascade retains. Brouns et al. (2008) Science 321:960-964. In other prokaryotes, Cas6 processes the CRISPR transcript. The CRISPR-based phage inactivation in E. coli requires Cascade and Cas3, but not Cas1 or Cas2. The Cmr (Cas RAMP module) proteins in Pyrococcus furiosus and other prokaryotes form a functional complex with small CRISPR RNAs that recognizes and cleaves complementary target RNAs. A simpler CRISPR system relies on the protein Cas9, which is a nuclease with two active cutting sites, one for each strand of the double helix. Combining Cas9 and modified CRISPR locus RNA can be used in a system for gene editing. Pennisi (2013) Science 341:833-836.

[0856] The CRISPR/Cas system can thus be used to edit a TCR and/or HLA gene (adding or deleting a basepair), or introducing a premature stop which thus decreases expression of a TCR and/or HLA. The CRISPR/Cas system can alternatively be used like RNA interference, turning off TCR and/or HLA gene in a reversible fashion. In a mammalian cell, for example, the RNA can guide the Cas protein to a TCR and/or HLA promoter, sterically blocking RNA polymerases.

[0857] Artificial CRISPR/Cas systems can be generated which inhibit TCR and/or HLA, using technology known in the art, e.g., that described in U.S. Publication No. 20140068797, and Cong (2013) Science 339:819-823. Other artificial CRISPR/Cas systems that are known in the art may also be generated which inhibit TCR and/or HLA, e.g., that described in Tsai (2014) Nature Biotechnol., 32:6 569-576, U.S. Pat. Nos. 8,871,445; 8,865,406; 8,795,965; 8,771,945; and 8,697,359.

TALEN to Inhibit TCR and/or HLA

[0858] “TALEN” or “TALEN to HLA and/or TCR” or “TALEN to inhibit HLA and/or TCR” refers to a transcription activator-like effector nuclease, an artificial nuclease which can be used to edit the HLA and/or TCR gene.

[0859] TALENs are produced artificially by fusing a TAL effector DNA binding domain to a DNA cleavage domain. Transcription activator-like effects (TALEs) can be engineered to bind any desired DNA sequence, including a portion of the HLA or TCR gene. By combining an engineered TALE with a DNA cleavage domain, a restriction enzyme can be produced which is specific to any desired DNA sequence, including a HLA or TCR sequence. These can then be introduced into a cell, wherein they can be used for genome editing. Boch (2011) Nature Biotech. 29:135-6; and Boch et al. (2009) Science 326:1509-12; Moscou et al. (2009) Science 326:3501.

[0860] TALEs are proteins secreted by Xanthomonas bacteria. The DNA binding domain contains a repeated, highly conserved 33-34 amino acid sequence, with the exception of the 12th and 13th amino acids. These two positions are highly variable, showing a strong correlation with specific nucleotide recognition. They can thus be engineered to bind to a desired DNA sequence.

[0861] To produce a TALEN, a TALE protein is fused to a nuclease (N), which is a wild-type or mutated FokI endonuclease. Several mutations to FokI have been made for its use in TALENs; these, for example, improve cleavage specificity or activity. Cermak et al. (2011) Nucl. Acids Res. 39: e82; Miller et al. (2011) Nature Biotech. 29:143-8; Hockemeyer et al. (2011) Nature Biotech. 29:731-734; Wood et al. (2011) Science 333:307; Doyon et al. (2010) Nature Methods 8:74-79; Szczepek et al. (2007) Nature Biotech. 25:786-793; and Guo et al. (2010) J. Mol. Biol. 200:96.

[0862] The FokI domain functions as a dimer, requiring two constructs with unique DNA binding domains for sites in the target genome with proper orientation and spacing. Both the number of amino acid residues between the TALE DNA binding domain and the FokI cleavage domain and the number of bases between the two individual TALEN binding sites appear to be important parameters for achieving high levels of activity. Miller et al. (2011) Nature Biotech. 29:143-8.

[0863] A HLA or TCR TALEN can be used inside a cell to produce a double-stranded break (DSB). A mutation can be introduced at the break site if the repair mechanisms improperly repair the break via non-homologous end joining. For example, improper repair may introduce a frame shift mutation. Alternatively, foreign DNA can be introduced into the cell along with the TALEN; depending on the sequences of the foreign DNA and chromosomal sequence, this process can be used to correct a defect in the HLA or TCR gene or introduce such a defect into a wt HLA or TCR gene, thus decreasing expression of HLA or TCR.

[0864] TALENs specific to sequences in HLA or TCR can be constructed using any method known in the art, including various schemes using modular components. Zhang et al. (2011) Nature Biotech. 29:149-53; Geibler et al. (2011) PLoS ONE 6: e19509.

Zinc Finger Nuclease to Inhibit HLA and/or TCR

[0865] “ZFN” or “Zinc Finger Nuclease” or “ZFN to HLA and/or TCR” or “ZFN to inhibit HLA and/or TCR” refer to a zinc finger nuclease, an artificial nuclease which can be used to edit the HLA and/or TCR gene.

[0866] Like a TALEN, a ZFN comprises a FokI nuclease domain (or derivative thereof) fused to a DNA-binding domain. In the case of a ZFN, the DNA-binding domain comprises one or more zinc fingers. Carroll et al. (2011) Genetics Society of America 188:773-782; and Kim et al. (1996) Proc. Natl. Acad. Sci. USA 93:1156-1160.

[0867] A zinc finger is a small protein structural motif stabilized by one or more zinc ions. A zinc finger can comprise, for example, Cys2His2, and can recognize an approximately 3-bp sequence. Various zinc fingers of known specificity can be combined to produce multi-finger polypeptides which recognize about 6, 9, 12, 15 or 18-bp sequences. Various selection and modular assembly techniques are available to generate zinc fingers (and combinations thereof) recognizing specific sequences, including phage display, yeast one-hybrid systems, bacterial one-hybrid and two-hybrid systems, and mammalian cells.

[0868] Like a TALEN, a ZFN must dimerize to cleave DNA. Thus, a pair of ZFNs are required to target non-palindromic DNA sites. The two individual ZFNs must bind opposite strands of the DNA with their nucleases properly spaced apart. Bitinaite et al. (1998) Proc. Natl. Acad. Sci. USA 95:10570-5.

[0869] Also like a TALEN, a ZFN can create a double-stranded break in the DNA, which can create a frame-shift mutation if improperly repaired, leading to a decrease in the expression and amount of HLA and/or TCR in a cell. ZFNs can also be used with homologous recombination to mutate in the HLA or TCR gene.

[0870] ZFNs specific to sequences in HLA AND/OR TCR can be constructed using any method known in the art. See, e.g., Provasi (2011) Nature Med. 18:807-815; Torikai (2013) Blood 122:1341-1349; Cathomen et al. (2008) Mol. Ther. 16:1200-7; Guo et al. (2010) J. Mol. Biol. 400:96; U.S. Patent Publication 2011/0158957; and U.S. Patent Publication 2012/0060230.

### Telomerase Expression

[0871] While not wishing to be bound by any particular theory, in some embodiments, a therapeutic T cell has short term persistence in a patient, due to shortened telomeres in the T cell; accordingly, transfection with a telomerase gene can lengthen the telomeres of the T cell and improve persistence of the T cell in the patient. See Carl June, “Adoptive T cell therapy for cancer in the clinic”, Journal of Clinical Investigation, 117:1466-1476 (2007). Thus, in an embodiment, an immune effector cell, e.g., a T cell, ectopically expresses a telomerase subunit, e.g., the catalytic subunit of telomerase, e.g., TERT, e.g., hTERT. In some aspects, this disclosure provides a method of producing an anti-target CAR-expressing cell, comprising contacting a cell with a nucleic acid encoding a telomerase subunit, e.g., the catalytic subunit of telomerase, e.g., TERT, e.g., hTERT. The cell may be contacted with the nucleic acid before, simultaneous with, or after being contacted with a construct encoding an anti-target CAR.

[0872] In one aspect, the disclosure features a method of making a population of immune effector cells (e.g., T cells, NK cells). In an embodiment, the method comprises: providing a population of immune effector cells (e.g., T cells or NK cells), contacting the population of immune effector cells with a nucleic acid encoding a CAR; and contacting the population of immune effector cells with a nucleic acid encoding a telomerase subunit, e.g., hTERT, under conditions that allow for anti-target CAR and telomerase expression.

[0873] In an embodiment, the nucleic acid encoding the telomerase subunit is DNA. In an embodiment, the nucleic acid encoding the telomerase subunit comprises a promoter capable of driving expression of the telomerase subunit.

[0874] In an embodiment, hTERT has the amino acid sequence of GenBank Protein ID AAC51724.1 (Meyerson et al., “hEST2, the Putative Human Telomerase Catalytic Subunit Gene, Is Up-Regulated in Tumor Cells and during Immortalization” Cell Volume 90, Issue 4, 22 Aug. 1997, Pages 785-795) as follows:

(SEQ ID NO: 61)
[sequence omitted]

[0875] In an embodiment, the hTERT has a sequence at least 80%, 85%, 90%, 95%, 96∧, 97%, 98%, or 99% identical to the sequence of SEQ ID NO: 61. In an embodiment, the hTERT has a sequence of SEQ ID NO: 61. In an embodiment, the hTERT comprises a deletion (e.g., of no more than 5, 10, 15, 20, or 30 amino acids) at the N-terminus, the C-terminus, or both. In an embodiment, the hTERT comprises a transgenic amino acid sequence (e.g., of no more than 5, 10, 15, 20, or 30 amino acids) at the N-terminus, the C-terminus, or both.

[0876] In an embodiment, the hTERT is encoded by the nucleic acid sequence of GenBank Accession No. AF018167 (Meyerson et al., “hEST2, the Putative Human Telomerase Catalytic Subunit Gene, Is Up-Regulated in Tumor Cells and during Immortalization” Cell Volume 90, Issue 4, 22 Aug. 1997, Pages 785-795):

(SEQ ID NO: 62)

| | |
|---|---|
| 1 | caggcagcgt ggtcctgctg cgcacgtggg aagccctggc |
| | cccggccacc cccgcgatgc |
| 61 | cgcgcgctcc ccgctgccga gccgtgcgct ccctgctgcg |
| | cagccactac cgcgaggtgc |
| 121 | tgccgctggc cacgttcgtg cggcgcctgg ggccccaggg |
| | ctggcggctg gtgcagcgcg |
| 181 | gggacccggc ggctttccgc gcgctggtgg cccagtgcct |
| | ggtgtgcgtg ccctgggacg |
| 241 | cacggccgcc ccccgccgcc ccctccttcc gccaggtgtc |
| | ctgcctgaag gagctggtgg |
| 301 | cccgagtgct gcagaggctg tgcgagcgcg gcgcgaagaa |
| | cgtgctggcc ttcggcttcg |
| 361 | cgctgctgga cggggcccgc gggggccccc ccgaggcctt |
| | caccaccagc gtgcgcagct |
| 421 | acctgcccaa cacggtgacc gacgcactgc gggggagcgg |
| | ggcgtggggg ctgctgttgc |
| 481 | gccgcgtggg cgacgacgtg ctggttcacc tgctggcacg |
| | ctgcgcgctc tttgtgctgg |
| 541 | tggctcccag ctgcgcctac caggtgtgcg ggccgccgct |
| | gtaccagctc ggcgctgcca |
| 601 | ctcaggcccg gcccccgcca cacgctagtg gaccccgaag |
| | gcgtctggga tgcgaacggg |
| 661 | cctggaacca tagcgtcagg gaggccgggg tccccctggg |
| | cctgccagcc ccgggtgcga |
| 721 | ggaggcgcgg gggcagtgcc agccgaagtc tgccgttgcc |
| | caagaggccc aggcgtggcg |
| 781 | ctgcccctga gccggagcgg acgcccgttg ggcaggggtc |
| | ctgggcccac ccgggcagga |
| 841 | cgcgtggacc gagtgaccgt ggtttctgtg tggtgtcacc |
| | tgccagaccc gccgaagaag |
| 901 | ccacctcttt ggagggtgcg ctctctggca cgcgccactc |
| | ccacccatcc gtgggccgcc |
| 961 | agcaccacgc gggcccccca tccacatcgc ggccaccacg |
| | tccctgggac acgccttgtc |
| 1021 | ccccggtgta cgccgagacc aagcacttcc tctactcctc |
| | aggcgacaag gagcagctgc |
| 1081 | ggccctcctt cctactcagc tctctgaggc ccagcctgac |
| | tggcgctcgg aggctcgtgg |
| 1141 | agaccatctt tctgggttcc aggccctgga tgccagggac |
| | tccccgcagg ttgccccgcc |
| 1201 | tgccccagcg ctactggcaa atgcggcccc tgtttctgga |
| | gctgcttggg aaccacgcgc |
| 1261 | agtgccccta cggggtgctc ctcaagacgc actgcccgct |
| | gcgagctgcg gtcaccccag |
| 1321 | cagccggtgt ctgtgcccgg gagaagcccc agggctctgt |
| | ggcggccccc gaggaggagg |
| 1381 | acacagaccc ccgtcgcctg gtgcagctgc tccgccagca |
| | cagcagcccc tggcaggtgt |
| 1441 | acggcttcgt gcgggcctgc ctgcgccggc tggtgccccc |
| | aggcctctgg ggctccaggc |
| 1501 | acaacgaacg ccgcttcctc aggaacacca agaagttcat |
| | ctccctgggg aagcatgcca |
| 1561 | agctctcgct gcaggagctg acgtggaaga tgagcgtgcg |
| | gggctgcgct tggctgcgca |
| 1621 | ggagcccagg ggttggctgt gttccggccg cagagcaccg |
| | tctgcgtgag gagatcctgg |
| 1681 | ccaagttcct gcactggctg atgagtgtgt acgtcgtcga |
| | gctgctcagg tctttctttt |
| 1741 | atgtcacgga gaccacgttt caaaagaaca ggctcttttt |
| | ctaccggaag agtgtctgga |
| 1801 | gcaagttgca aagcattgga atcagacagc acttgaagag |
| | ggtgcagctg cgggagctgt |
| 1861 | cggaagcaga ggtcaggcag catcgggaag ccaggcccgc |
| | cctgctgacg tccagactcc |
| 1921 | gcttcatccc caagcctgac gggctgcggc cgattgtgaa |
| | catggactac gtcgtgggag |
| 1981 | ccagaacgtt ccgcagagaa aagagggccg agcgtctcac |
| | ctcgagggtg aaggcactgt |
| 2041 | tcagcgtgct caactacgag cgggcgcggc gccccggcct |
| | cctgggcgcc tctgtgctgg |
| 2101 | gcctggacga tatccacagg gcctggcgca ccttcgtgct |
| | gcgtgtgcgg gcccaggacc |
| 2161 | cgccgcctga gctgtacttt gtcaaggtgg atgtgacggg |
| | cgcgtacgac accatccccc |
| 2221 | aggacaggct cacggaggtc atcgccagca tcatcaaacc |
| | ccagaacacg tactgcgtgc |
| 2281 | gtcggtatgc cgtggtccag aaggccgccc atgggcacgt |
| | ccgcaaggcc ttcaagagcc |
| 2341 | acgtctctac cttgacagac ctccagccgt acatgcgaca |
| | gttcgtggct cacctgcagg |
| 2401 | agaccagccc gctgagggat gccgtcgtca tcgagcagag |
| | ctcctccctg aatgaggcca |
| 2461 | gcagtggcct cttcgacgtc ttcctacgct tcatgtgcca |
| | ccacgccgtg cgcatcaggg |
| 2521 | gcaagtccta cgtccagtgc caggggatcc cgcagggctc |
| | catcctctcc acgctgctct |
| 2581 | gcagcctgtg ctacggcgac atggagaaca agctgtttgc |
| | ggggattcgg cgggacgggc |
| 2641 | tgctcctgcg tttggtggat gatttcttgt tggtgacacc |
| | tcacctcacc cacgcgaaaa |
| 2701 | ccttcctcag gaccctggtc cgaggtgtcc ctgagtatgg |
| | ctgcgtggtg aacttgcgga |
| 2761 | agacagtggt gaacttccct gtagaagacg aggccctggg |
| | tggcacggct tttgttcaga |
| 2821 | tgccggccca cggcctattc ccctggtgcg gcctgctgct |
| | ggatacccgg accctggagg |
| 2881 | tgcagagcga ctactccagc tatgcccgga cctccatcag |
| | agccagtctc accttcaacc |
| 2941 | gcggcttcaa ggctgggagg aacatgcgtc gcaaactctt |
| | tggggtcttg cggctgaagt |
| 3001 | gtcacagcct gtttctggat ttgcaggtga acagcctcca |
| | gacggtgtgc accaacatct |
| 3061 | acaagatcct cctgctgcag gcgtacaggt ttcacgcatg |
| | tgtgctgcag ctcccatttc |
| 3121 | atcagcaagt ttggaagaac cccacatttt tcctgcgcgt |
| | catctctgac acggcctccc |
| 3181 | tctgctactc catcctgaaa gccaagaacg cagggatgtc |
| | gctgggggcc aagggcgccg |
| 3241 | ccggccctct gccctccgag gccgtgcagt ggctgtgcca |
| | ccaagcattc ctgctcaagc |
| 3301 | tgactcgaca ccgtgtcacc tacgtgccac tcctggggtc |
| | actcaggaca gcccagacgc |
| 3361 | agctgagtcg gaagctcccg gggacgacgc tgactgccct |
| | ggaggccgca gccaacccgg |
| 3421 | cactgccctc agacttcaag accatcctgg actgatggcc |
| | acccgcccac agccaggccg |
| 3481 | agagcagaca ccagcagccc tgtcacgccg ggctctacgt |
| | cccagggagg gaggggcggc |
| 3541 | ccacacccag gcccgcaccg ctgggagtct gaggcctgag |
| | tgagtgtttg gccgaggcct |
| 3601 | gcatgtccgg ctgaaggctg agtgtccggc tgaggcctga |
| | gcgagtgtcc agccaagggc |
| 3661 | tgagtgtcca gcacacctgc cgtcttcact tccccacagg |
| | ctggcgctcg gctccacccc |
| 3721 | agggccagct tttcctcacc aggagcccgg cttccactcc |
| | ccacatagga atagtccatc |
| 3781 | cccagattcg ccattgttca cccctcgccc tgccctcctt |
| | tgccttccac ccccaccatc |
| 3841 | caggtggaga ccctgagaag gaccctggga gctctgggaa |
| | tttggagtga ccaaaggtgt |
| 3901 | gccctgtaca caggcgagga ccctgcacct ggatgggggt |
| | ccctgtgggt caaattgggg |
| 3961 | ggaggtgctg tgggagtaaa atactgaata tatgagtttt |
| | tcagttttga aaaaaaaaaa |
| 4021 | aaaaaaa |

[0877] In an embodiment, the hTERT is encoded by a nucleic acid having a sequence at least 80%, 85%, 90%, 95%, 96, 97%, 98%, or 99% identical to the sequence of SEQ ID NO: 62. In an embodiment, the hTERT is encoded by a nucleic acid of SEQ ID NO: 62.

### Activation and Expansion of Immune Effector Cells (e.g., T Cells)

[0878] Immune effector cells such as T cells may be activated and expanded generally using methods as described, for example, in U.S. Pat. Nos. 6,352,694; 6,534,055; 6,905,680; 6,692,964; 5,858,358; 6,887,466; 6,905,681; 7,144,575; 7,067,318; 7,172,869; 7,232,566; 7,175,843; 5,883,223; 6,905,874; 6,797,514; 6,867,041; and U.S. Patent Application Publication No. 20060121005.

[0879] As demonstrated by the data disclosed herein, expanding the T cells by the methods disclosed herein can multiply the cells by about 10 fold, 20 fold, 30 fold, 40 fold, 50 fold, 60 fold, 70 fold, 80 fold, 90 fold, 100 fold, 200 fold, 300 fold, 400 fold, 500 fold, 600 fold, 700 fold, 800 fold, 900 fold, 1000 fold, 2000 fold, 3000 fold, 4000 fold, 5000 fold, 6000 fold, 7000 fold, 8000 fold, 9000 fold, 10,000 fold, 100,000 fold, 1,000,000 fold, 10,000,000 fold, or greater, and any and all whole or partial integers therebetween. In one embodiment, the T cells expand in the range of about 20 fold to about 50 fold.

[0880] Generally, a population of immune effector cells e.g., T regulatory cell depleted cells, may be expanded by contact with a surface having attached thereto an agent that stimulates a CD3/TCR complex associated signal and a ligand that stimulates a costimulatory molecule on the surface of the T cells. In particular, T cell populations may be stimulated as described herein, such as by contact with an anti-CD3 antibody, or antigen-binding fragment thereof, or an anti-CD2 antibody immobilized on a surface, or by contact with a protein kinase C activator (e.g., bryostatin) in conjunction with a calcium ionophore. For co-stimulation of an accessory molecule on the surface of the T cells, a ligand that binds the accessory molecule is used. For example, a population of T cells can be contacted with an anti-CD3 antibody and an anti-CD28 antibody, under conditions appropriate for stimulating proliferation of the T cells. To stimulate proliferation of either CD4+ T cells or CD8+ T cells, an anti-CD3 antibody and an anti-CD28 antibody can be used. Examples of an anti-CD28 antibody include 9.3, B-T3, XR-CD28 (Diaclone, Besançon, France) can be used as can other methods commonly known in the art (Berg et al., Transplant Proc. 30 (8): 3975-3977, 1998; Haanen et al., J. Exp. Med. 190 (9): 13191328, 1999; Garland et al., J. Immunol Meth. 227 (1-2): 53-63, 1999).

[0881] In certain aspects, the primary stimulatory signal and the costimulatory signal for the T cell may be provided by different protocols. For example, the agents providing each signal may be in solution or coupled to a surface. When coupled to a surface, the agents may be coupled to the same surface (i.e., in “cis” formation) or to separate surfaces (i.e., in “trans” formation). Alternatively, one agent may be coupled to a surface and the other agent in solution. In one aspect, the agent providing the costimulatory signal is bound to a cell surface and the agent providing the primary activation signal is in solution or coupled to a surface. In certain aspects, both agents can be in solution. In one aspect, the agents may be in soluble form, and then cross-linked to a surface, such as a cell expressing Fc receptors or an antibody or other binding agent which will bind to the agents. In this regard, see for example, U.S. Patent Application Publication Nos. 20040101519 and 20060034810 for artificial antigen presenting cells (aAPCs) that are contemplated for use in activating and expanding T cells in the present invention.

[0882] In one aspect, the two agents are immobilized on beads, either on the same bead, i.e., “cis,” or to separate beads, i.e., “trans.” By way of example, the agent providing the primary activation signal is an anti-CD3 antibody or an antigen-binding fragment thereof and the agent providing the costimulatory signal is an anti-CD28 antibody or antigen-binding fragment thereof; and both agents are co-immobilized to the same bead in equivalent molecular amounts. In one aspect, a 1:1 ratio of each antibody bound to the beads for CD4+ T cell expansion and T cell growth is used. In certain aspects of the present invention, a ratio of anti CD3: CD28 antibodies bound to the beads is used such that an increase in T cell expansion is observed as compared to the expansion observed using a ratio of 1:1. In one particular aspect an increase of from about 1 to about 3 fold is observed as compared to the expansion observed using a ratio of 1:1. In one aspect, the ratio of CD3: CD28 antibody bound to the beads ranges from 100:1 to 1:100 and all integer values there between. In one aspect, more anti-CD28 antibody is bound to the particles than anti-CD3 antibody, i.e., the ratio of CD3: CD28 is less than one. In certain aspects, the ratio of anti CD28 antibody to anti CD3 antibody bound to the beads is greater than 2:1. In one particular aspect, a 1:100 CD3: CD28 ratio of antibody bound to beads is used. In one aspect, a 1:75 CD3: CD28 ratio of antibody bound to beads is used. In a further aspect, a 1:50 CD3: CD28 ratio of antibody bound to beads is used. In one aspect, a 1:30 CD3: CD28 ratio of antibody bound to beads is used. In one preferred aspect, a 1:10 CD3: CD28 ratio of antibody bound to beads is used. In one aspect, a 1:3 CD3: CD28 ratio of antibody bound to the beads is used. In yet one aspect, a 3:1 CD3: CD28 ratio of antibody bound to the beads is used.

[0883] Ratios of particles to cells from 1:500 to 500:1 and any integer values in between may be used to stimulate T cells or other target cells. As those of ordinary skill in the art can readily appreciate, the ratio of particles to cells may depend on particle size relative to the target cell. For example, small sized beads could only bind a few cells, while larger beads could bind many. In certain aspects the ratio of cells to particles ranges from 1:100 to 100:1 and any integer values in-between and in further aspects the ratio comprises 1:9 to 9:1 and any integer values in between, can also be used to stimulate T cells. The ratio of anti-CD3- and anti-CD28-coupled particles to T cells that result in T cell stimulation can vary as noted above, however certain preferred values include 1:100, 1:50, 1:40, 1:30, 1:20, 1:10, 1:9, 1:8, 1:7, 1:6, 1:5, 1:4, 1:3, 1:2, 1:1, 2:1, 3:1, 4:1, 5:1, 6:1, 7:1, 8:1, 9:1, 10:1, and 15:1 with one preferred ratio being at least 1:1 particles per T cell. In one aspect, a ratio of particles to cells of 1:1 or less is used. In one particular aspect, a preferred particle: cell ratio is 1:5. In further aspects, the ratio of particles to cells can be varied depending on the day of stimulation. For example, in one aspect, the ratio of particles to cells is from 1:1 to 10:1 on the first day and additional particles are added to the cells every day or every other day thereafter for up to 10 days, at final ratios of from 1:1 to 1:10 (based on cell counts on the day of addition). In one particular aspect, the ratio of particles to cells is 1:1 on the first day of stimulation and adjusted to 1:5 on the third and fifth days of stimulation. In one aspect, particles are added on a daily or every other day basis to a final ratio of 1:1 on the first day, and 1:5 on the third and fifth days of stimulation. In one aspect, the ratio of particles to cells is 2:1 on the first day of stimulation and adjusted to 1:10 on the third and fifth days of stimulation. In one aspect, particles are added on a daily or every other day basis to a final ratio of 1:1 on the first day, and 1:10 on the third and fifth days of stimulation. One of skill in the art will appreciate that a variety of other ratios may be suitable for use in the present invention. In particular, ratios will vary depending on particle size and on cell size and type. In one aspect, the most typical ratios for use are in the neighborhood of 1:1, 2:1 and 3:1 on the first day.

[0884] In further aspects, the cells, such as T cells, are combined with agent-coated beads, the beads and the cells are subsequently separated, and then the cells are cultured. In an alternative aspect, prior to culture, the agent-coated beads and cells are not separated but are cultured together. In a further aspect, the beads and cells are first concentrated by application of a force, such as a magnetic force, resulting in increased ligation of cell surface markers, thereby inducing cell stimulation.

[0885] By way of example, cell surface proteins may be ligated by allowing paramagnetic beads to which anti-CD3 and anti-CD28 are attached (3×28 beads) to contact the T cells. In one aspect the cells (for example, 10⁴ to 10⁹ T cells) and beads (for example, DYNABEADS® M-450 CD3/CD28 T paramagnetic beads at a ratio of 1:1) are combined in a buffer, for example PBS (without divalent cations such as, calcium and magnesium). Again, those of ordinary skill in the art can readily appreciate any cell concentration may be used. For example, the target cell may be very rare in the sample and comprise only 0.01% of the sample or the entire sample (i.e., 100%) may comprise the target cell of interest. Accordingly, any cell number is within the context of the present invention. In certain aspects, it may be desirable to significantly decrease the volume in which particles and cells are mixed together (i.e., increase the concentration of cells), to ensure maximum contact of cells and particles. For example, in one aspect, a concentration of about 10 billion cells/ml, 9 billion/ml, 8 billion/ml, 7 billion/ml, 6 billion/ml, 5 billion/ml, or 2 billion cells/ml is used. In one aspect, greater than 100 million cells/ml is used. In a further aspect, a concentration of cells of 10, 15, 20, 25, 30, 35, 40, 45, or 50 million cells/ml is used. In yet one aspect, a concentration of cells from 75, 80, 85, 90, 95, or 100 million cells/ml is used. In further aspects, concentrations of 125 or 150 million cells/ml can be used. Using high concentrations can result in increased cell yield, cell activation, and cell expansion. Further, use of high cell concentrations allows more efficient capture of cells that may weakly express target antigens of interest, such as CD28-negative T cells. Such populations of cells may have therapeutic value and would be desirable to obtain in certain aspects. For example, using high concentration of cells allows more efficient selection of CD8+ T cells that normally have weaker CD28 expression.

[0886] In one embodiment, cells transduced with a nucleic acid encoding an anti-target CAR, e.g., an anti-target CAR described herein, are expanded, e.g., by a method described herein. In one embodiment, the cells are expanded in culture for a period of several hours (e.g., about 2, 3, 4, 5, 6, 7, 8, 9, 10, 15, 18, 21 hours) to about 14 days (e.g., 1, 2, 3, 4, 5, 6, 7, 8, 9, 10, 11, 12, 13 or 14 days). In one embodiment, the cells are expanded for a period of 4 to 9 days. In one embodiment, the cells are expanded for a period of 8 days or less, e.g., 7, 6 or 5 days. In one embodiment, the cells, e.g., an anti-target CAR cell described herein, are expanded in culture for 5 days, and the resulting cells are more potent than the same cells expanded in culture for 9 days under the same culture conditions. Potency can be defined, e.g., by various T cell functions, e.g. proliferation, target cell killing, cytokine production, activation, migration, or combinations thereof. In one embodiment, the cells, e.g., an anti-target CAR cell described herein, expanded for 5 days show at least a one, two, three or four fold increase in cells doublings upon antigen stimulation as compared to the same cells expanded in culture for 9 days under the same culture conditions. In one embodiment, the cells, e.g., the cells expressing an anti-target CAR described herein, are expanded in culture for 5 days, and the resulting cells exhibit higher proinflammatory cytokine production, e.g., IFN-γ and/or GM-CSF levels, as compared to the same cells expanded in culture for 9 days under the same culture conditions. In one embodiment, the cells, e.g., an anti-target CAR cell described herein, expanded for 5 days show at least a one, two, three, four, five, ten fold or more increase in pg/ml of proinflammatory cytokine production, e.g., IFN-γ and/or GM-CSF levels, as compared to the same cells expanded in culture for 9 days under the same culture conditions.

[0887] Several cycles of stimulation may also be desired such that culture time of T cells can be 60 days or more. Conditions appropriate for T cell culture include an appropriate media (e.g., Minimal Essential Media or RPMI Media 1640 or, X-vivo 15, (Lonza)) that may contain factors necessary for proliferation and viability, including serum (e.g., fetal bovine or human serum), interleukin-2 (IL-2), insulin, IFN-γ, IL-4, IL-7, GM-CSF, IL-10, IL-12, IL-15, TGFB, and TNF-α or any other additives for the growth of cells known to the skilled artisan. Other additives for the growth of cells include, but are not limited to, surfactant, plasmanate, and reducing agents such as N-acetyl-cysteine and 2-mercaptoethanol. Media can include RPMI 1640, AIM-V, DMEM, MEM, a-MEM, F-12, X-Vivo 15, and X-Vivo 20, Optimizer, with added amino acids, sodium pyruvate, and vitamins, either serum-free or supplemented with an appropriate amount of serum (or plasma) or a defined set of hormones, and/or an amount of cytokine(s) sufficient for the growth and expansion of T cells. Antibiotics, e.g., penicillin and streptomycin, are included only in experimental cultures, not in cultures of cells that are to be infused into a subject. The target cells are maintained under conditions necessary to support growth, for example, an appropriate temperature (e.g., 37° C.) and atmosphere (e.g., air plus 5% CO2).

[0888] In one embodiment, the cells are expanded in an appropriate media (e.g., media described herein) that includes one or more interleukin that result in at least a 200-fold (e.g., 200-fold, 250-fold, 300-fold, 350-fold) increase in cells over a 14 day expansion period, e.g., as measured by a method described herein such as flow cytometry. In one embodiment, the cells are expanded in the presence of IL-15 and/or IL-7 (e.g., IL-15 and IL-7).

[0889] In embodiments, methods described herein, e.g., anti-target CAR-expressing cell manufacturing methods, comprise removing T regulatory cells, e.g., CD25+ T cells, from a cell population, e.g., using an anti-CD25 antibody, or fragment thereof, or a CD25-binding ligand, IL-2. Methods of removing T regulatory cells, e.g., CD25+ T cells, from a cell population are described herein. In embodiments, the methods, e.g., manufacturing methods, further comprise contacting a cell population (e.g., a cell population in which T regulatory cells, such as CD25+ T cells, have been depleted; or a cell population that has previously contacted an anti-CD25 antibody, fragment thereof, or CD25-binding ligand) with IL-15 and/or IL-7. For example, the cell population (e.g., that has previously contacted an anti-CD25 antibody, fragment thereof, or CD25-binding ligand) is expanded in the presence of IL-15 and/or IL-7.

[0890] In some embodiments an anti-target CAR-expressing cell described herein is contacted with a composition comprising a interleukin-15 (IL-15) polypeptide, a interleukin-15 receptor alpha (IL-15Ra) polypeptide, or a combination of both a IL-15 polypeptide and a IL-15Ra polypeptide e.g., hetIL-15, during the manufacturing of the anti-target CAR-expressing cell, e.g., ex vivo. In embodiments, an anti-target CAR-expressing cell described herein is contacted with a composition comprising a IL-15 polypeptide during the manufacturing of the anti-target CAR-expressing cell, e.g., ex vivo. In embodiments, an anti-target CAR-expressing cell described herein is contacted with a composition comprising a combination of both a IL-15 polypeptide and a IL-15 Ra polypeptide during the manufacturing of the anti-target CAR-expressing cell, e.g., ex vivo. In embodiments, an anti-target CAR-expressing cell described herein is contacted with a composition comprising hetIL-15 during the manufacturing of the anti-target CAR-expressing cell, e.g., ex vivo.

[0891] In one embodiment the anti-target CAR-expressing cell described herein is contacted with a composition comprising hetIL-15 during ex vivo expansion. In an embodiment, the anti-target CAR-expressing cell described herein is contacted with a composition comprising an IL-15 polypeptide during ex vivo expansion. In an embodiment, the anti-target CAR-expressing cell described herein is contacted with a composition comprising both an IL-15 polypeptide and an IL-15Ra polypeptide during ex vivo expansion. In one embodiment the contacting results in the survival and proliferation of a lymphocyte subpopulation, e.g., CD8+ T cells.

[0892] T cells that have been exposed to varied stimulation times may exhibit different characteristics. For example, typical blood or apheresed peripheral blood mononuclear cell products have a helper T cell population (TH, CD4+) that is greater than the cytotoxic or suppressor T cell population (TC, CD8+). Ex vivo expansion of T cells by stimulating CD3 and CD28 receptors produces a population of T cells that prior to about days 8-9 consists predominately of TH cells, while after about days 8-9, the population of T cells comprises an increasingly greater population of TC cells. Accordingly, depending on the purpose of treatment, infusing a subject with a T cell population comprising predominately of TH cells may be advantageous. Similarly, if an antigen-specific subset of TC cells has been isolated it may be beneficial to expand this subset to a greater degree.

[0893] Further, in addition to CD4 and CD8 markers, other phenotypic markers vary significantly, but in large part, reproducibly during the course of the cell expansion process. Thus, such reproducibility enables the ability to tailor an activated T cell product for specific purposes.

[0894] Once an anti-target CAR described herein is constructed, various assays can be used to evaluate the activity of the molecule, such as but not limited to, the ability to expand T cells following antigen stimulation, sustain T cell expansion in the absence of re-stimulation, and anti-cancer activities in appropriate in vitro and animal models. Assays to evaluate the effects of a cars of the present invention are described in further detail below

[0895] Western blot analysis of anti-target CAR expression in primary T cells can be used to detect the presence of monomers and dimers. See, e.g., Milone et al., Molecular Therapy 17 (8): 1453-1464 (2009). Very briefly, T cells (1:1 mixture of CD4+ and CD8+ T cells) expressing the CARs are expanded in vitro for more than 10 days followed by lysis and SDS-PAGE under reducing conditions. Anti-target CARs containing the full length TCR-2 cytoplasmic domain and the endogenous TCR-chain are detected by western blotting using an antibody to the TCR-chain. The same T cell subsets are used for SDS-PAGE analysis under non-reducing conditions to permit evaluation of covalent dimer formation.

[0896] In vitro expansion of anti-target CAR⁺ T cells following antigen stimulation can be measured by flow cytometry. For example, a mixture of CD4⁺ and CD8⁺ T cells are stimulated with αCD3/αCD28 aAPCs followed by transduction with lentiviral vectors expressing GFP under the control of the promoters to be analyzed. Exemplary promoters include the CMV IE gene, EF-la, ubiquitin C, or phosphoglycerokinase (PGK) promoters. GFP fluorescence is evaluated on day 6 of culture in the CD4⁺ and/or CD8⁺ T cell subsets by flow cytometry. See, e.g., Milone et al., Molecular Therapy 17 (8): 1453-1464 (2009). Alternatively, a mixture of CD4⁺ and CD8⁺ T cells are stimulated with αCD3/αCD28 coated magnetic beads on day 0, and transduced with anti-target CAR on day 1 using a bicistronic lentiviral vector expressing anti-target CAR along with eGFP using a 2A ribosomal skipping sequence. Cultures are re-stimulated with either a cancer associated antigen as described herein⁺K562 cells (K562 expressing a cancer associated antigen as described herein), wild-type K562 cells (K562 wild type) or K562 cells expressing hCD32 and 4-1BBL in the presence of antiCD3 and anti-CD28 antibody (K562-BBL-3/28) following washing. Exogenous IL-2 is added to the cultures every other day at 100 IU/ml. GFP⁺ T cells are enumerated by flow cytometry using bead-based counting. See, e.g., Milone et al., Molecular Therapy 17 (8): 1453-1464 (2009).

[0897] Sustained anti-target CAR⁺ T cell expansion in the absence of re-stimulation can also be measured. See, e.g., Milone et al., Molecular Therapy 17 (8): 1453-1464 (2009). Briefly, mean T cell volume (fl) is measured on day 8 of culture using a Coulter Multisizer III particle counter, a Nexcelom Cellometer Vision or Millipore Scepter, following stimulation with aCD3/aCD28 coated magnetic beads on day 0, and transduction with the indicated anti-target CAR on day 1.

[0898] Animal models can also be used to measure anti-target CAR CART activity. For example, the xenograft model using a human cancer cell line as described in Example 1 can be used to measure anti-target CAR CART activity.

[0899] Dose dependent anti-target CAR treatment response can be evaluated. Exemplary methods used for evaluating CAR treatment response can be used to measure anti-target CAR treatment responses. See, e.g., Milone et al., Molecular Therapy 17 (8): 1453-1464 (2009). For example, peripheral blood is obtained 35-70 days after establishing leukemia in mice injected on day 21 with CAR T cells, an equivalent number of mock-transduced T cells, or no T cells. Mice from each group are randomly bled for determination of peripheral blood a cancer associate antigen as described herein⁺ALL blast counts and then killed on days 35 and 49. The remaining animals are evaluated on days 57 and 70.

[0900] Assessment of cell proliferation and cytokine production has been previously described, e.g., at Milone et al., Molecular Therapy 17 (8): 1453-1464 (2009). Briefly, assessment of anti-target CAR-mediated proliferation is performed in microtiter plates by mixing washed T cells with K562 cells expressing a cancer associated antigen described herein (K19) or CD32 and CD137 (KT32-BBL) for a final T-cell: K562 ratio of 2:1. K562 cells are irradiated with gamma-radiation prior to use. Anti-CD3 (clone OKT3) and anti-CD28 (clone 9.3) monoclonal antibodies are added to cultures with KT32-BBL cells to serve as a positive control for stimulating T-cell proliferation since these signals support long-term CD8+ T cell expansion ex vivo. T cells are enumerated in cultures using CountBright™ fluorescent beads (Invitrogen, Carlsbad, CA) and flow cytometry as described by the manufacturer. CAR+ T cells are identified by GFP expression using T cells that are engineered with eGFP-2A linked anti-target CAR-expressing lentiviral vectors. For anti-target CAR+ T cells not expressing GFP, the anti-target CAR+ T cells are detected with biotinylated recombinant a cancer associate antigen as described herein protein and a secondary avidin-PE conjugate. CD4+ and CD8+expression on T cells are also simultaneously detected with specific monoclonal antibodies (BD Biosciences). Cytokine measurements are performed on supernatants collected 24 hours following re-stimulation using the human TH1/TH2 cytokine cytometric bead array kit (BD Biosciences, San Diego, CA) according the manufacturer's instructions. Fluorescence is assessed using a FACScalibur flow cytometer, and data is analyzed according to the manufacturer's instructions.

[0901] Cytotoxicity can be assessed by a standard 51Cr-release assay. See, e.g., Milone et al., Molecular Therapy 17 (8): 1453-1464 (2009). Briefly, target cells (K562 lines and primary pro-B-ALL cells) are loaded with 51Cr (as NaCrO4, New England Nuclear, Boston, MA) at 37° C. for 2 hours with frequent agitation, washed twice in complete RPMI and plated into microtiter plates. Effector T cells are mixed with target cells in the wells in complete RPMI at varying ratios of effector cell: target cell (E: T). Additional wells containing media only (spontaneous release, SR) or a 1% solution of triton-X 100 detergent (total release, TR) are also prepared. After 4 hours of incubation at 37° C., supernatant from each well is harvested. Released 51Cr is then measured using a gamma particle counter (Packard Instrument Co., Waltham, MA). Each condition is performed in at least triplicate, and the percentage of lysis is calculated using the formula: % Lysis=(ER−SR)/(TR−SR), where ER represents the average 51Cr released for each experimental condition.

[0902] Imaging technologies can be used to evaluate specific trafficking and proliferation of anti-target CARs in tumor-bearing animal models. Such assays have been described for CARs, for example, in Barrett et al., Human Gene Therapy 22:1575-1586 (2011). Similar assays can be used to evaluate specific trafficking and proliferation of anti-target CARs in tumor-bearing animal models. Briefly, NOD/SCID/γc^{-/-} (NSG) mice are injected IV with Nalm-6 cells followed 7 days later with T cells 4 hour after electroporation with the CAR constructs. The T cells are stably transfected with a lentiviral construct to express firefly luciferase, and mice are imaged for bioluminescence. Alternatively, therapeutic efficacy and specificity of a single injection of CAR⁺ T cells in Nalm-6 xenograft model can be measured as the following: NSG mice are injected with Nalm-6 transduced to stably express firefly luciferase, followed by a single tail-vein injection of T cells electroporated with cars of the present invention 7 days later. Animals are imaged at various time points post injection. For example, photon-density heat maps of firefly luciferase positive leukemia in representative mice at day 5 (2 days before treatment) and day 8 (24 hr post CAR⁺PBLs) can be generated.

[0903] Other assays, including those described in the Example section herein as well as those that are known in the art can also be used to evaluate the anti-target CARs described herein.

### Therapeutic Application

[0904] The modified cells described herein may be included in a composition for therapy. In one aspect, the composition comprises a population of modified T cells comprising a nucleic acid sequence encoding an anti-target CAR. In yet another embodiment, the composition includes a modified T cell comprising an anti-target CAR that comprises a costimulatory domain described herein, e.g., that increases anti-tumor effect and T cell persistence. The composition may include a pharmaceutical composition and further include a pharmaceutically acceptable carrier. A therapeutically effective amount of the pharmaceutical composition comprising the modified cells may be administered.

[0905] In one aspect, the invention includes a method comprising administering a population of modified T cells to a subject in need thereof to treat a disease associated with expression of a target CAR (e.g., a disease in which a target CAR is expressed), wherein the modified T cells comprise a nucleic acid sequence encoding an anti-target CAR. In one embodiment, the disease associated with expression of a target CAR is a cancer, e.g., a cancer as described herein, or a non-cancerous condition, e.g., B cell aplasia.

[0906] In one aspect, the invention provides methods for treating a disease associated with expression of a target CAR (e.g., a disease in which a target CAR is expressed).

[0907] In one aspect, the present invention provides methods of treating a disease associated with expression of a target CAR (e.g., a disease in which a target CAR is expressed), e.g., a cancer, by providing to the subject in need thereof immune effector cells (e.g., T cells, NK cells) that are engineered to express an anti-target CAR described herein, wherein the cancer cells express a target CAR. In one embodiment, the target CAR is expressed on cancer cells. In one embodiment, the target CAR is not expressed, on normal cells. In one embodiment, the method further comprises selecting an anti-target CAR that binds a target CAR with an affinity that allows the anti-target CAR to bind and kill the cancer cells expressing the target CAR. In one embodiment, the selected anti-target CAR has an antigen binding domain that has a binding affinity KD of 10⁻⁴ M to 10⁻⁸ M, e.g., 10⁻⁵ M to 10⁻⁷ M, e.g., 10⁻⁶ M or 10⁻⁷ M, for the target CAR, e.g., for the extracellular domain of the target CAR, e.g., the antigen binding domain or hinge region of the target CAR. In one embodiment, the selected ligand of the anti-target CAR comprises an antibody molecule, e.g., an anti-idiotypic antibody, which has a binding affinity that is at least five-fold, 10-fold, 20-fold, 30-fold, 50-fold, 100-fold or 1,000-fold less than a reference antibody, e.g., an antibody described herein.

[0908] In one embodiment, the disease associated with expression of a target CAR (e.g., a disease in which a target CAR is expressed) to be treated is ALL (acute lymphoblastic leukemia), CLL (chronic lymphocytic leukemia), DLBCL (diffuse large B-cell lymphoma), MCL (Mantle cell lymphoma, or MM (multiple myeloma).

[0909] In one embodiment, the present invention provides methods of treating a disease associated with expression of a target CAR (e.g., a disease in which a target CAR is expressed), e.g., a cancer by providing to the subject in need thereof immune effector cells (e.g., T cells, NK cells) that are engineered to express an anti-target CAR that binds to a target CAR, wherein the subject has experienced relapse and the relapsed cancer cells do not express the antigen bound by the target CAR (e.g., the relapsed cancer cells are negative for the target CAR antigen). In an embodiment,
[0910] a) the target CAR is a CD19CAR, the anti-target CAR binds to the CD19CAR, the subject had a CD19 expressing disease, and the relapse is a CD19-negative relapse;
[0911] b) the target CAR is a CD33 CAR, the anti-target CAR binds to the CD33CAR, the subject had a CD33 expressing disease, and the relapse is a CD33-negative relapse;
[0912] c) the target CAR is an EGFRvIIICAR, the anti-target CAR binds to the EGFRvIIICAR, the subject had a EGFRvIII expressing disease, and the relapse is a EGFRvIII-negative relapse;
[0913] d) the target CAR is a mesothelinCAR, the anti-target CAR binds to the mesothelinCAR, the subject had a mesothelin expressing disease, and the relapse is a mesothelin-negative relapse;
[0914] e) the target CAR is a BCMACAR, the anti-target CAR binds to the BCMACAR, the subject had a BCMA expressing disease, and the relapse is a BCMA-negative relapse;
[0915] f) the target CAR is a CD20CAR, the anti-target CAR binds to the CD20CAR, the subject had a CD20 expressing disease, and the relapse is a CD20-negative relapse;
[0916] g) the target CAR is a CD22CAR, the anti-target CAR binds to the CD22CAR, the subject had a CD22 expressing disease, and the relapse is a CD22-negative relapse;
[0917] h) the target CAR is a CD123CAR, the anti-target CAR binds to the CD123CAR, the subject had a CD123 expressing disease, and the relapse is a CD123-negative relapse; or
[0918] i) the target CAR is a CAR that binds to a tumor antigen described herein, the anti-target CAR binds to the target CAR, the subject had a disease expressing the tumor antigen bound by the target CAR, and the relapse is negative for expression of the tumor antigen bound by the target CAR.

[0919] In one aspect, the present invention relates to treatment of a subject in vivo using an PD1 CAR such that growth of a disease associated with expression of a target CAR (e.g., a disease in which a target CAR is expressed) is inhibited. A PD1 CAR may be used alone to inhibit the growth of a disease associated with expression of a target CAR (e.g., a disease in which a target CAR is expressed). Alternatively, PD1 CAR may be used in conjunction with an anti-target CARs, immunogenic agents, standard cancer treatments, or other antibodies. In one embodiment, the subject is treated with a PD1 CAR and an anti-target CAR described herein. In an embodiment, a PD1 CAR is used in conjunction with anti-target CAR, e.g., an anti-target CAR described herein, and a kinase inhibitor, e.g., a kinase inhibitor described herein.

[0920] In another aspect, a method of treating a subject, e.g., reducing or ameliorating, a hyperproliferative condition or disorder, e.g., a disease associated with expression of a target CAR (e.g., a disease in which a target CAR is expressed), e.g., a cancer, e.g., solid tumor, a soft tissue tumor, or a metastatic lesion, in a subject is provided. As used herein, the term “cancer” is meant to include all types of cancerous growths or oncogenic processes, metastatic tissues or malignantly transformed cells, tissues, or organs, irrespective of histopathologic type or stage of invasiveness. Examples of solid tumors include malignancies, e.g., sarcomas, adenocarcinomas, and carcinomas, of the various organ systems, such as those affecting liver, lung, breast, lymphoid, gastrointestinal (e.g., colon), genitourinary tract (e.g., renal, urothelial cells), prostate and pharynx. Adenocarcinomas include malignancies such as most colon cancers, rectal cancer, renal-cell carcinoma, liver cancer, non-small cell carcinoma of the lung, cancer of the small intestine and cancer of the esophagus. In one embodiment, the cancer is a melanoma, e.g., an advanced stage melanoma. Metastatic lesions of the aforementioned cancers can also be treated or prevented using the methods and compositions of the invention. Examples of other cancers that can be treated include bone cancer, pancreatic cancer, skin cancer, cancer of the head or neck, cutaneous or intraocular malignant melanoma, uterine cancer, ovarian cancer, rectal cancer, cancer of the anal region, stomach cancer, testicular cancer, uterine cancer, carcinoma of the fallopian tubes, carcinoma of the endometrium, carcinoma of the cervix, carcinoma of the vagina, carcinoma of the vulva, Hodgkin Disease, non-Hodgkin lymphoma, cancer of the esophagus, cancer of the small intestine, cancer of the endocrine system, cancer of the thyroid gland, cancer of the parathyroid gland, cancer of the adrenal gland, sarcoma of soft tissue, cancer of the urethra, cancer of the penis, chronic or acute leukemias including acute myeloid leukemia, chronic myeloid leukemia, acute lymphoblastic leukemia, chronic lymphocytic leukemia, solid tumors of childhood, lymphocytic lymphoma, cancer of the bladder, cancer of the kidney or ureter, carcinoma of the renal pelvis, neoplasm of the central nervous system (CNS), primary CNS lymphoma, tumor angiogenesis, spinal axis tumor, brain stem glioma, pituitary adenoma, Kaposi's sarcoma, epidermoid cancer, squamous cell cancer, T-cell lymphoma, environmentally induced cancers including those induced by asbestos, and combinations of said cancers. Treatment of metastatic cancers, e.g., metastatic cancers that express PD-L1 (Iwai et al. (2005) Int. Immunol. 17:133-144) can be effected using the antibody molecules described herein.

[0921] Exemplary cancers whose growth can be inhibited include cancers typically responsive to immunotherapy. Non-limiting examples of cancers for treatment include melanoma (e.g., metastatic malignant melanoma), renal cancer (e.g. clear cell carcinoma), prostate cancer (e.g. hormone refractory prostate adenocarcinoma), breast cancer, colon cancer and lung cancer (e.g. non-small cell lung cancer). Additionally, refractory or recurrent malignancies can be treated using the molecules described herein.

[0922] In one aspect, the invention pertains to a vector comprising an anti-target CAR operably linked to promoter for expression in mammalian immune effector cells (e.g., T cells, NK cells). In one aspect, the invention provides a recombinant immune effector cell expressing an anti-target CAR of the present invention for use in treating a disease associated with expression of a target CAR. In one aspect, anti-target CAR-expressing cells of the invention are capable of contacting a cell, e.g., a cell expressing a target CAR, e.g., a cell from a disease associated with expression of the target CAR (e.g., a cancer) with at least one target CAR molecule expressed on its surface such that the anti-target CAR-expressing cell targets the cancer cell and growth of the cancer is inhibited.

[0923] In one aspect, the invention pertains to a method of inhibiting growth of a disease associated with expression of a target CAR, e.g., a cancer, comprising contacting the cancer cell with an anti-target CAR-expressing cell of the present invention such that the CART is activated in response to the target CAR antigen and targets the cancer cell expressing the target CAR, wherein the growth of the tumor associated with the target CAR is inhibited.

[0924] In one aspect, the invention pertains to a method of treating disease associated with expression of a target CAR, e.g., a cancer in a subject. The method comprises administering to the subject anti-target CAR-expressing cell of the present invention such that the cancer is treated in the subject. In one aspect, the cancer associated with expression of a target CAR as described herein is a hematological cancer. In one aspect, the hematological cancer is a leukemia or a lymphoma. In one aspect, a cancer associated with expression of target CAR as described herein includes cancers and malignancies including, but not limited to, e.g., one or more acute leukemias including but not limited to, e.g., B-cell acute Lymphoid Leukemia (“BALL”), T-cell acute Lymphoid Leukemia (“TALL”), acute lymphoid leukemia (ALL); one or more chronic leukemias including but not limited to, e.g., chronic myelogenous leukemia (CML), Chronic Lymphoid Leukemia (CLL). Additional cancers or hematologic conditions associated with expression of a target CAR as described herein include, but are not limited to, e.g., B cell prolymphocytic leukemia, blastic plasmacytoid dendritic cell neoplasm, Burkitt's lymphoma, diffuse large B cell lymphoma, Follicular lymphoma, Hairy cell leukemia, small cell- or a large cell-follicular lymphoma, malignant lymphoproliferative conditions, MALT lymphoma, mantle cell lymphoma, Marginal zone lymphoma, multiple myeloma, myelodysplasia and myelodysplastic syndrome, non-Hodgkin lymphoma, plasmablastic lymphoma, plasmacytoid dendritic cell neoplasm, Waldenstrom macroglobulinemia, and “preleukemia” which are a diverse collection of hematological conditions united by ineffective production (or dysplasia) of myeloid blood cells, and the like. Further a disease associated with expression of a target CAR as described herein expression include, but not limited to, e.g., atypical and/or non-classical cancers, malignancies, precancerous conditions, immune-related disorders, e.g., B cell aplasia, or proliferative diseases associated with expression of a target CAR as described herein.

[0925] In some embodiments, a disease associated with expression of a target CAR, e.g., a cancer, that can be treated with anti-target CAR-expressing cell of the present invention is multiple myeloma. Multiple myeloma is a cancer of the blood, characterized by accumulation of a plasma cell clone in the bone marrow. Current therapies for multiple myeloma include, but are not limited to, treatment with lenalidomide, which is an analog of thalidomide. Lenalidomide has activities which include anti-tumor activity, angiogenesis inhibition, and immunomodulation. Generally, myeloma cells are thought to be negative for a cancer associate antigen as described herein expression by flow cytometry. Thus, in some embodiments, an anti-target CAR that binds to a CD19CAR, e.g., as described herein, may be used to target myeloma cells that do not express CD19. In some embodiments, anti-target CARS of the present invention therapy can be used in combination with one or more additional therapies, e.g., lenalidomide treatment.

[0926] The invention includes a type of cellular therapy where immune effector cells (e.g., T cells, NK cells) are genetically modified to express an anti-target CAR and the anti-target CAR-expressing T cell or NK cell is infused to a recipient in need thereof. The infused cell is able to kill cells associated with expression of a target CAR, e.g., tumor cells, in the recipient. Unlike antibody therapies, anti-target CAR-modified immune effector cells (e.g., T cells, NK cells) are able to replicate in vivo resulting in long-term persistence that can lead to sustained tumor control. In various aspects, the immune effector cells (e.g., T cells, NK cells) administered to the patient, or their progeny, persist in the patient for at least four months, five months, six months, seven months, eight months, nine months, ten months, eleven months, twelve months, thirteen months, fourteen month, fifteen months, sixteen months, seventeen months, eighteen months, nineteen months, twenty months, twenty-one months, twenty-two months, twenty-three months, two years, three years, four years, or five years after administration of the T cell or NK cell to the patient.

[0927] The invention also includes a type of cellular therapy where immune effector cells (e.g., T cells, NK cells) are modified, e.g., by in vitro transcribed RNA, to transiently express an anti-target CAR and the anti-target CAR T cell or NK cell is infused to a recipient in need thereof. The infused cell is able to kill cells associated with expression of a target CAR, e.g., tumor cells in the recipient. Thus, in various aspects, the immune effector cells (e.g., T cells, NK cells) administered to the patient, is present for less than one month, e.g., three weeks, two weeks, one week, after administration of the T cell or NK cell to the patient.

[0928] Without wishing to be bound by any particular theory, the anti-tumor immunity response elicited by the anti-target CAR-modified immune effector cells (e.g., T cells, NK cells) may be an active or a passive immune response, or alternatively may be due to a direct vs indirect immune response. In one aspect, the anti-target CAR transduced immune effector cells (e.g., T cells, NK cells) exhibit specific proinflammatory cytokine secretion and potent cytolytic activity in response to human cancer cells expressing the target CAR described herein, resist inhibition with a soluble cancer associate antigen as described herein, or mediate bystander killing and mediate regression of an established human tumor.

[0929] In one aspect, the fully-human anti-target CAR-modified immune effector cells (e.g., T cells, NK cells) of the invention may be a type of vaccine for ex vivo immunization and/or in vivo therapy in a mammal. In one aspect, the mammal is a human.

[0930] With respect to ex vivo immunization, at least one of the following occurs in vitro prior to administering the cell into a mammal: i) expansion of the cells, ii) introducing a nucleic acid encoding an anti-target CAR to the cells or iii) cryopreservation of the cells.

[0931] Ex vivo procedures are well known in the art and are discussed more fully below. Briefly, cells are isolated from a mammal (e.g., a human) and genetically modified (i.e., transduced or transfected in vitro) with a vector expressing an anti-target CAR disclosed herein. The anti-target CAR-modified cell can be administered to a mammalian recipient to provide a therapeutic benefit. The mammalian recipient may be a human and the anti-target CAR-modified cell can be autologous with respect to the recipient. Alternatively, the cells can be allogeneic, syngeneic or xenogeneic with respect to the recipient.

[0932] The procedure for ex vivo expansion of hematopoietic stem and progenitor cells is described in U.S. Pat. No. 5,199,942, incorporated herein by reference, can be applied to the cells of the present invention. Other suitable methods are known in the art, therefore the present invention is not limited to any particular method of ex vivo expansion of the cells. Briefly, ex vivo culture and expansion of immune effector cells (e.g., T cells, NK cells) comprises: (1) collecting CD34+ hematopoietic stem and progenitor cells from a mammal from peripheral blood harvest or bone marrow explants; and (2) expanding such cells ex vivo. In addition to the cellular growth factors described in U.S. Pat. No. 5,199,942, other factors such as flt3-L, IL-1, IL-3 and c-kit ligand, can be used for culturing and expansion of the cells.

[0933] In addition to using a cell-based vaccine in terms of ex vivo immunization, the present invention also provides compositions and methods for in vivo immunization to elicit an immune response directed against an antigen in a patient.

[0934] Generally, the cells activated and expanded as described herein may be utilized in the treatment and prevention of diseases that arise in individuals who are immunocompromised. In particular, the anti-target CAR-modified immune effector cells (e.g., T cells, NK cells) of the invention are used in the treatment of diseases, disorders and conditions associated with expression of a target CAR as described herein. In certain aspects, the cells of the invention are used in the treatment of patients at risk for developing diseases, disorders and conditions associated with expression of a target CAR as described herein. Thus, the present invention provides methods for the treatment of diseases, disorders and conditions associated with expression of a target CAR as described herein comprising administering to a subject in need thereof, a therapeutically effective amount of the anti-target CAR-modified immune effector cells (e.g., T cells, NK cells) of the invention.

[0935] In one aspect the anti-target CAR-expressing cells of the inventions may be used to treat a disease associated with expression of a target CAR, e.g., a proliferative disease such as a cancer or malignancy or is a precancerous condition such as a myelodysplasia, a myelodysplastic syndrome or a preleukemia. Further a disease associated with a target CAR expression as described herein expression include, but not limited to, e.g., atypical and/or non-classical cancers, malignancies, precancerous conditions, or proliferative diseases expressing a target CAR as described herein. Non-cancer related indications associated with expression of a target CAR herein include, but are not limited to, e.g., autoimmune disease, (e.g., lupus), inflammatory disorders (allergy and asthma), immune-related disorders, e.g., B cell aplasia, and transplantation. In an embodiment, the disease is B cell aplasia.

[0936] The anti-target CAR-modified immune effector cells (e.g., T cells, NK cells) of the present invention may be administered either alone, or as a pharmaceutical composition in combination with diluents and/or with other components such as IL-2 or other cytokines or cell populations.

### Hematologic Cancer

[0937] Hematological cancer conditions are the types of cancer such as leukemia, lymphoma, and malignant lymphoproliferative conditions that affect blood, bone marrow and the lymphatic system.

[0938] Leukemia can be classified as acute leukemia and chronic leukemia. Acute leukemia can be further classified as acute myelogenous leukemia (AML) and acute lymphoid leukemia (ALL). Chronic leukemia includes chronic myelogenous leukemia (CML) and chronic lymphoid leukemia (CLL). Other related conditions include myelodysplastic syndromes (MDS, formerly known as “preleukemia”) which are a diverse collection of hematological conditions united by ineffective production (or dysplasia) of myeloid blood cells and risk of transformation to AML.

[0939] Lymphoma is a group of blood cell tumors that develop from lymphocytes. Exemplary lymphomas include non-Hodgkin lymphoma and Hodgkin lymphoma.

[0940] The present invention provides for compositions and methods for treating cancer. In one aspect, the cancer is a hematologic cancer including but is not limited to hematological cancer is a leukemia or a lymphoma. In one aspect, the anti-target CAR-expressing cells of the invention may be used to treat cancers and malignancies such as, but not limited to, e.g., acute leukemias including but not limited to, e.g., B-cell acute lymphoid leukemia (“BALL”), T-cell acute lymphoid leukemia (“TALL”), acute lymphoid leukemia (ALL); one or more chronic leukemias including but not limited to, e.g., chronic myelogenous leukemia (CML), chronic lymphocytic leukemia (CLL); additional hematologic cancers or hematologic conditions including, but not limited to, e.g., B cell prolymphocytic leukemia, blastic plasmacytoid dendritic cell neoplasm, Burkitt's lymphoma, diffuse large B cell lymphoma, Follicular lymphoma, Hairy cell leukemia, small cell- or a large cell-follicular lymphoma, malignant lymphoproliferative conditions, MALT lymphoma, mantle cell lymphoma, Marginal zone lymphoma, multiple myeloma, myelodysplasia and myelodysplastic syndrome, non-Hodgkin lymphoma, plasmablastic lymphoma, plasmacytoid dendritic cell neoplasm, Waldenstrom macroglobulinemia, and “preleukemia” which are a diverse collection of hematological conditions united by ineffective production (or dysplasia) of myeloid blood cells, and the like. Further a disease associated with a cancer associate antigen as described herein expression includes, but not limited to, e.g., atypical and/or non-classical cancers, malignancies, precancerous conditions or proliferative diseases expressing a cancer associate antigen as described herein.

[0941] The present invention also provides methods for inhibiting the proliferation or reducing a cancer associated antigen as described herein-expressing cell population, the methods comprising contacting a population of cells comprising a target CAR as described herein-expressing cell with an anti-target CAR-expressing T cell or NK cell of the invention that binds to the target CAR-expressing cell. In a specific aspect, the present invention provides methods for inhibiting the proliferation or reducing the population of cells expressing a target CAR, e.g., cancer cells, as described herein, the methods comprising contacting a target CAR-expressing cancer cell population with an anti-target CAR-expressing T cell or NK cell of the invention that binds to a target CAR-expressing cell. In one aspect, the present invention provides methods for inhibiting the proliferation or reducing the population of cells expressing a target CAR as described herein, the methods comprising contacting a target CAR-expressing cancer cell population with an anti-target CAR-expressing T cell or NK cell of the invention that binds to a target CAR-expressing cell. In certain aspects, an anti-target CAR-expressing T cell or NK cell of the invention reduces the quantity, number, amount or percentage of target CAR expressing cells, e.g., cancer cells by at least 25%, at least 30%, at least 40%, at least 50%, at least 65%, at least 75%, at least 85%, at least 95%, or at least 99% in a subject with or animal model for myeloid leukemia or another cancer associated with a target CAR described herein-expressing cells relative to a negative control. In one aspect, the subject is a human.

[0942] The present invention also provides methods for preventing, treating and/or managing a disease associated with expression of a target CAR-expressing cells (e.g., a hematologic cancer or atypical cancer expressing a cancer associated antigen as described herein), the methods comprising administering to a subject in need an anti-target CAR T cell or NK cell of the invention that binds to target CAR-expressing cell. In one aspect, the subject is a human. Non-limiting examples of disorders associated with a target CAR-expressing cells include autoimmune disorders (such as lupus), inflammatory disorders (such as allergies and asthma), immune related disorders such as B cell aplasia, and cancers (such as hematological cancers or atypical cancers expressing a target CAR as described herein).

[0943] The present invention also provides methods for preventing, treating and/or managing a disease associated with a target CAR as described herein-expressing cells, the methods comprising administering to a subject in need an anti-target CAR T cell or NK cell of the invention that binds to a target CAR-expressing cell. In one aspect, the subject is a human.

[0944] The present invention provides methods for treating relapse of cancer associated with target CAR-expressing cells, the methods comprising administering to a subject in need thereof an anti-target CAR T cell or NK cell of the invention that binds to a target CAR as described herein-expressing cell. In one aspect, the methods comprise administering to the subject in need thereof an effective amount of an anti-target CAR-expressing T cell or NK cell described herein that binds to a target CAR as described herein-expressing cell in combination with an effective amount of another therapy.

### Combination Therapies

[0945] A CAR-expressing cell, e.g., an anti-target CAR expressing cell described herein, may be used in combination with other known agents and therapies. Administered “in combination”, as used herein, means that two (or more) different treatments are delivered to the subject during the course of the subject's affliction with the disorder, e.g., the two or more treatments are delivered after the subject has been diagnosed with the disorder and before the disorder has been cured or eliminated or treatment has ceased for other reasons. In some embodiments, the delivery of one treatment is still occurring when the delivery of the second begins, so that there is overlap in terms of administration. This is sometimes referred to herein as “simultaneous” or “concurrent delivery”. In other embodiments, the delivery of one treatment ends before the delivery of the other treatment begins. In some embodiments of either case, the treatment is more effective because of combined administration. For example, the second treatment is more effective, e.g., an equivalent effect is seen with less of the second treatment, or the second treatment reduces symptoms to a greater extent, than would be seen if the second treatment were administered in the absence of the first treatment, or the analogous situation is seen with the first treatment. In some embodiments, delivery is such that the reduction in a symptom, or other parameter related to the disorder is greater than what would be observed with one treatment delivered in the absence of the other. The effect of the two treatments can be partially additive, wholly additive, or greater than additive. The delivery can be such that an effect of the first treatment delivered is still detectable when the second is delivered.

[0946] A CAR-expressing cell, e.g., an anti-target CAR expressing cell described herein and the at least one additional therapeutic agent can be administered simultaneously, in the same or in separate compositions, or sequentially. For sequential administration, the CAR-expressing cell described herein can be administered first, and the additional agent can be administered second, or the order of administration can be reversed.

[0947] The anti-target CAR therapy and/or other therapeutic agents, procedures or modalities can be administered during periods of active disorder, or during a period of remission or less active disease. The anti-target CAR therapy can be administered before the other treatment, concurrently with the treatment, post-treatment, or during remission of the disorder.

[0948] When administered in combination, the anti-target CAR therapy and the additional agent (e.g., second or third agent), or all, can be administered in an amount or dose that is higher, lower or the same than the amount or dosage of each agent used individually, e.g., as a monotherapy. In certain embodiments, the administered amount or dosage of the anti-target CAR therapy, the additional agent (e.g., second or third agent), or all, is lower (e.g., at least 20%, at least 30%, at least 40%, or at least 50%) than the amount or dosage of each agent used individually, e.g., as a monotherapy. In other embodiments, the amount or dosage of the anti-target CAR therapy, the additional agent (e.g., second or third agent), or all, that results in a desired effect (e.g., treatment of cancer) is lower (e.g., at least 20%, at least 30%, at least 40%, or at least 50% lower) than the amount or dosage of each agent used individually, e.g., as a monotherapy, required to achieve the same therapeutic effect.

[0949] In certain embodiments of the methods or uses described herein, the anti-target CAR molecule is administered in combination with an agent that increases the efficacy of the immune effector cell, e.g., one or more of a protein phosphatase inhibitor, a kinase inhibitor, a cytokine, an inhibitor of an immune inhibitory molecule; or an agent that decreases the level or activity of a TREG cell.

[0950] In certain embodiments of the methods or uses described herein, the protein phosphatase inhibitor is a SHP-1 inhibitor and/or an SHP-2 inhibitor.

[0951] In other embodiments of the methods or uses described herein, kinase inhibitor is chosen from one or more of a CDK4 inhibitor, a CDK4/6 inhibitor (e.g., palbociclib), a BTK inhibitor (e.g., ibrutinib or RN-486), an mTOR inhibitor (e.g., rapamycin or everolimus (RAD001)), an MNK inhibitor, or a dual P13K/mTOR inhibitor. In one embodiment, the BTK inhibitor does not reduce or inhibit the kinase activity of interleukin-2-inducible kinase (ITK).

[0952] In other embodiments of the methods or uses described herein, the agent that inhibits the immune inhibitory molecule comprises an antibody or antibody fragment, an inhibitory nucleic acid, a clustered regularly interspaced short palindromic repeats (CRISPR), a transcription-activator like effector nuclease (TALEN), or a zinc finger endonuclease (ZFN) that inhibits the expression of the inhibitory molecule.

[0953] In other embodiments of the methods or uses described herein, the agent that decreases the level or activity of the TREG cells is chosen from cyclophosphamide, anti-GITR antibody, CD25-depletion, or a combination thereof.

[0954] In certain embodiments of the methods or uses described herein, the immune inhibitory molecule is selected from the group consisting of PD1, PD-L1, CTLA-4, TIM-3, LAG-3, VISTA, BTLA, TIGIT, LAIR1, CD160, 2B4, TGF beta, CEACAM-1, CEACAM-3, and CEACAM-5.

[0955] In other embodiments, the agent that inhibits the inhibitory molecule comprises a first polypeptide comprising an inhibitory molecule or a fragment thereof and a second polypeptide that provides a positive signal to the cell, and wherein the first and second polypeptides are expressed on the anti-target CAR-containing immune cells, wherein (i) the first polypeptide comprises PD1, PD-L1, CTLA-4, TIM-3, LAG3, VISTA, BTLA, TIGIT, LAIR1, CD160, 2B4, TGF beta, CEACAM-1, CEACAM-3, and CEACAM-5 or a fragment thereof; and/or (ii) the second polypeptide comprises an intracellular signaling domain comprising a primary signaling domain and/or a costimulatory signaling domain. In one embodiment, the primary signaling domain comprises a functional domain of CD3 zeta; and/or the costimulatory signaling domain comprises a functional domain of a protein selected from 41BB, CD27 and CD28.

[0956] In other embodiments, cytokine is chosen from IL-7, IL-15 or IL-21, or both.

[0957] In other embodiments, the immune effector cell comprising the anti-target CAR molecule and a second, e.g., any of the combination therapies disclosed herein (e.g., the agent that that increases the efficacy of the immune effector cell) are administered substantially simultaneously or sequentially.

[0958] In other embodiments, the immune cell comprising the anti-target CAR molecule is administered in combination with a molecule that targets GITR and/or modulates GITR function. In certain embodiments, the molecule targeting GITR and/or modulating GITR function is administered prior to the anti-target CAR-expressing cell or population of cells, or prior to apheresis.

[0959] In one embodiment, lymphocyte infusion, for example allogeneic lymphocyte infusion, is used in the treatment of the cancer, wherein the lymphocyte infusion comprises at least one anti-target CAR-expressing cell of the present invention. In one embodiment, autologous lymphocyte infusion is used in the treatment of the cancer, wherein the autologous lymphocyte infusion comprises at least one anti-target CAR-expressing cell described herein.

[0960] In one embodiment, the cell is a T cell and the T cell is diacylglycerol kinase (DGK) deficient. In one embodiment, the cell is a T cell and the T cell is Ikaros deficient. In one embodiment, the cell is a T cell and the T cell is both DGK and Ikaros deficient.

[0961] In one embodiment, the method includes administering a cell expressing the anti-target CAR moleculein combination with an agent which enhances the activity of a anti-target CAR-expressing cell, wherein the agent is a cytokine, e.g., IL-7, IL-15, IL-21, or a combination thereof. The cytokine can be delivered in combination with, e.g., simultaneously or shortly after, administration of the anti-target CAR-expressing cell. Alternatively, the cytokine can be delivered after a prolonged period of time after administration of the anti-target CAR-expressing cell, e.g., after assessment of the subject's response to the anti-target CAR-expressing cell. In one embodiment the cytokine is administered to the subject simultaneously (e.g., administered on the same day) with or shortly after administration (e.g., administered 1 day, 2 days, 3 days, 4 days, 5 days, 6 days, or 7 days after administration) of the cell or population of cells of any of claims 61-80. In other embodiments, the cytokine is administered to the subject after a prolonged period of time (e.g., e.g., at least 2 weeks, 3 weeks, 4 weeks, 6 weeks, 8 weeks, 10 weeks, or more) after administration of the cell or population of cells of any of claims 61-80, or after assessment of the subject's response to the cell.

[0962] In other embodiments, the cells expressing an anti-target CAR molecule are administered in combination with an agent that reduces or ameliorates one or more side effects associated with administration of a cell expressing a anti-target CAR molecule. Side effects associated with the anti-target CAR-expressing cell can be chosen from cytokine release syndrome (CRS) or hemophagocytic lymphohistiocytosis (HLH).

[0963] In embodiments of any of the aforesaid methods or uses, the cells expressing the anti-target CAR molecule are administered in combination with an agent that treats the disease associated with expression of target CAR, e.g., any of the second or third therapies disclosed herein. Additional exemplary combinations include one or more of the following.

[0964] In another embodiment, the cell expressing the anti-target CAR molecule, e.g., as described herein, can be administered in combination with another agent, e.g., a kinase inhibitor and/or checkpoint inhibitor described herein. In an embodiment, a cell expressing the anti-target CAR molecule can further express another agent, e.g., an agent which enhances the activity of an anti-target CAR-expressing cell.

[0965] For example, in one embodiment, the agent that enhances the activity of an anti-target CAR-expressing cell can be an agent which inhibits an inhibitory molecule (e.g., an immune inhibitor molecule). Examples of inhibitory molecules include PD1, PD-L1, CTLA-4, TIM-3, CEACAM (e.g., CEACAM-1, CEACAM-3 and/or CEACAM-5), LAG-3, VISTA, BTLA, TIGIT, LAIR1, CD160, 2B4 and TGF beta.

[0966] In one embodiment, the agent that inhibits the inhibitory molecule is an inhibitory nucleic acid is a dsRNA, a siRNA, or a shRNA. In embodiments, the inhibitory nucleic acid is linked to the nucleic acid that encodes a component of the anti-target CAR molecule. For example, the inhibitory molecule can be expressed on the anti-target CAR-expressing cell.

[0967] In another embodiment, the agent which inhibits an inhibitory molecule, e.g., is a molecule described herein, e.g., an agent that comprises a first polypeptide, e.g., an inhibitory molecule, associated with a second polypeptide that provides a positive signal to the cell, e.g., an intracellular signaling domain described herein. In one embodiment, the agent comprises a first polypeptide, e.g., of an inhibitory molecule such as PD-1, PD-L1, CTLA-4, TIM-3, CEACAM (e.g., CEACAM-1, CEACAM-3 and/or CEACAM-5), LAG-3, VISTA, BTLA, TIGIT, LAIR1, CD160, 2B4 or TGF beta, or a fragment of any of these (e.g., at least a portion of the extracellular domain of any of these), and a second polypeptide which is an intracellular signaling domain described herein (e.g., comprising a costimulatory domain (e.g., 41BB, CD27 or CD28, e.g., as described herein) and/or a primary signaling domain (e.g., a CD3 zeta signaling domain described herein). In one embodiment, the agent comprises a first polypeptide of PD1 or a fragment thereof (e.g., at least a portion of the extracellular domain of PD1), and a second polypeptide of an intracellular signaling domain described herein (e.g., a 4-1BB signaling domain described herein and/or a CD3 zeta signaling domain described herein).

[0968] In one embodiment, the anti-target CAR-expressing immune effector cell of the present invention, e.g., T cell or NK cell, is administered to a subject that has received a previous stem cell transplantation, e.g., autologous stem cell transplantation.

[0969] In one embodiment, the anti-target CAR-expressing immune effector cell of the present invention, e.g., T cell or NK cells, is administered to a subject that has received a previous dose of melphalan.

[0970] In one embodiment, the cell expressing an anti-target CAR molecule, e.g., an anti-target CAR molecule described herein, is administered in combination with an agent that increases the efficacy of a cell expressing an anti-target CAR molecule, e.g., an agent described herein.

[0971] In one embodiment, the cells expressing an anti-target CAR molecule are administered in combination with a low, immune enhancing dose of an mTOR inhibitor. While not wishing to be bound by theory, it is believed that treatment with a low, immune enhancing, dose (e.g., a dose that is insufficient to completely suppress the immune system but sufficient to improve immune function) is accompanied by a decrease in PD-1 positive T cells or an increase in PD-1 negative cells. PD-1 positive T cells, but not PD-1 negative T cells, can be exhausted by engagement with cells which express a PD-1 ligand, e.g., PD-L1 or PD-L2.

[0972] In an embodiment this approach can be used to optimize the performance of anti-target CAR cells described herein in the subject. While not wishing to be bound by theory, it is believed that, in an embodiment, the performance of endogenous, non-modified immune effector cells, e.g., T cells or NK cells, is improved. While not wishing to be bound by theory, it is believed that, in an embodiment, the performance of a target antigen anti-target CAR-expressing cell is improved. In other embodiments, cells, e.g., T cells or NK cells, which have, or will be engineered to express an anti-target CAR, can be treated ex vivo by contact with an amount of an mTOR inhibitor that increases the number of PD1 negative immune effector cells, e.g., T cells or increases the ratio of PD1 negative immune effector cells, e.g., T cells/PD1 positive immune effector cells, e.g., T cells.

[0973] In an embodiment, administration of a low, immune enhancing, dose of an mTOR inhibitor, e.g., an allosteric inhibitor, e.g., RAD001, or a catalytic inhibitor, is initiated prior to administration of an anti-target CAR expressing cell described herein, e.g., T cells or NK cells. In an embodiment, the anti-target CAR cells are administered after a sufficient time, or sufficient dosing, of an mTOR inhibitor, such that the level of PD1 negative immune effector cells, e.g., T cells or NK cells, or the ratio of PD1 negative immune effector cells, e.g., T cells/PD1 positive immune effector cells, e.g., T cells, has been, at least transiently, increased.

[0974] In an embodiment, the cell, e.g., T cell or NK cell, to be engineered to express an anti-target CAR, is harvested after a sufficient time, or after sufficient dosing of the low, immune enhancing, dose of an mTOR inhibitor, such that the level of PD1 negative immune effector cells, e.g., T cells, or the ratio of PD1 negative immune effector cells, e.g., T cells/PD1 positive immune effector cells, e.g., T cells, in the subject or harvested from the subject has been, at least transiently, increased.

[0975] In one embodiment, the cell expressing an anti-target CAR molecule is administered in combination with an agent that reduces or ameliorates one or more side effect associated with administration of a cell expressing an anti-target CAR molecule, e.g., an agent described herein.

[0976] In one embodiment, the cell expressing an anti-target CAR molecule is administered in combination with an agent that treats the disease associated with a cancer associated antigen as described herein, e.g., an agent described herein.

[0977] In one embodiment, a cell expressing two or more anti-target CAR molecules, e.g., as described herein, is administered to a subject in need thereof to treat cancer. In one embodiment, a population of cells including an anti-target CAR expressing cell, e.g., as described herein, is administered to a subject in need thereof to treat cancer.

[0978] In one embodiment, the cell expressing an anti-target CAR molecule, is administered at a dose and/or dosing schedule described herein.

[0979] In one embodiment, the anti-target CAR molecule is introduced into immune effector cells (e.g., T cells, NK cells), e.g., using in vitro transcription, and the subject (e.g., human) receives an initial administration of cells comprising an anti-target CAR molecule and one or more subsequent administrations of cells comprising an anti-target CAR molecule wherein the one or more subsequent administrations are administered less than 15 days, e.g., 14, 13, 12, 11, 10, 9, 8, 7, 6, 5, 4, 3, or 2 days after the previous administration. In one embodiment, more than one administration of cells comprising an anti-target CAR molecule are administered to the subject (e.g., human) per week, e.g., 2, 3, or 4 administrations of cells comprising an anti-target CAR molecule are administered per week. In one embodiment, the subject (e.g., human subject) receives more than one administration of cells comprising an anti-target CAR molecule per week (e.g., 2, 3 or 4 administrations per week) (also referred to herein as a cycle), followed by a week of no administration of cells comprising an anti-target CAR molecule and then one or more additional administration of cells comprising an anti-target CAR molecule (e.g., more than one administration of the cells comprising an anti-target CAR molecule per week) is administered to the subject. In another embodiment, the subject (e.g., human subject) receives more than one cycle of cells comprising an anti-target CAR molecule, and the time between each cycle is less than 10, 9, 8, 7, 6, 5, 4, or 3 days. In one embodiment, the cells comprising an anti-target CAR molecule are administered every other day for 3 administrations per week. In one embodiment, the cells comprising an anti-target CAR molecule are administered for at least two, three, four, five, six, seven, eight or more weeks.

[0980] In one embodiment, a population of cells described herein is administered.

[0981] In another aspect, the invention pertains to the isolated nucleic acid molecule encoding an anti-target CAR of the invention, the isolated polypeptide molecule of an anti-target CAR of the invention, the vector comprising an anti-target CAR of the invention, and the cell comprising an anti-target CAR of the invention for use as a medicament.

[0982] In another aspect, the invention pertains to a the isolated nucleic acid molecule encoding an anti-target CAR of the invention, the isolated polypeptide molecule of an anti-target CAR of the invention, the vector comprising an anti-target CAR of the invention, and the cell comprising a CAR of the invention for use in the treatment of a disease expressing a target CAR as described herein.

[0983] In another aspect, the invention pertains to a cell expressing an anti-target CAR molecule for use as a medicament in combination with a cytokine, e.g., IL-7, IL-15 and/or IL-21 as described herein. In another aspect, the invention pertains to a cytokine described herein for use as a medicament in combination with a cell expressing an anti-target CAR molecule described herein.

[0984] In another aspect, the invention pertains to a cell expressing an anti-target CAR molecule for use as a medicament in combination with a kinase inhibitor and/or a checkpoint inhibitor as described herein. In another aspect, the invention pertains to a kinase inhibitor and/or a checkpoint inhibitor described herein for use as a medicament in combination with a cell expressing an anti-target CAR molecule described herein.

[0985] In another aspect, the invention pertains to a cell expressing an anti-target CAR molecule for use in combination with a cytokine, e.g., IL-7, IL-15 and/or IL-21 as described herein, in the treatment of a disease expressing a target CAR targeted by the anti-target CAR. In another aspect, the invention pertains to a cytokine described herein for use in combination with a cell expressing an anti-target CAR molecule described herein, in the treatment of a disease expressing a target CAR targeted by the anti-target CAR.

[0986] In another aspect, the invention pertains to a cell expressing an anti-target CAR molecule for use in combination with a kinase inhibitor and/or a checkpoint inhibitor as described herein, in the treatment of a disease expressing a target CAR targeted by the anti-target CAR. In another aspect, the invention pertains to a kinase inhibitor and/or a checkpoint inhibitor described herein for use in combination with a cell expressing a anti-target CAR molecule described herein, in the treatment of a disease expressing target CAR targeted by the CAR.

[0987] In one embodiment of the methods or uses described herein, the anti-target CAR molecule is administered in combination with another agent. In one embodiment, the agent can be a kinase inhibitor, e.g., a CDK4/6 inhibitor, a BTK inhibitor, an mTOR inhibitor, a MNK inhibitor, or a dual PI3K/mTOR inhibitor, and combinations thereof. In one embodiment, the kinase inhibitor is a CDK4 inhibitor, e.g., a CDK4 inhibitor described herein, e.g., a CD4/6 inhibitor, such as, e.g., 6-Acetyl-8-cyclopentyl-5-methyl-2-(5-piperazin-1-yl-pyridin-2-ylamino)-8H-pyrido[2,3-d]pyrimidin-7-one, hydrochloride (also referred to as palbociclib or PD0332991). In one embodiment, the kinase inhibitor is a BTK inhibitor, e.g., a BTK inhibitor described herein, such as, e.g., ibrutinib. In one embodiment, the kinase inhibitor is an mTOR inhibitor, e.g., an mTOR inhibitor described herein, such as, e.g., rapamycin, a rapamycin analog, OSI-027. The mTOR inhibitor can be, e.g., an mTORC1 inhibitor and/or an mTORC2 inhibitor, e.g., an mTORC1 inhibitor and/or mTORC2 inhibitor described herein. In one embodiment, the kinase inhibitor is a MNK inhibitor, e.g., a MNK inhibitor described herein, such as, e.g., 4-amino-5-(4-fluoroanilino)-pyrazolo[3,4-d]pyrimidine. The MNK inhibitor can be, e.g., a MNKla, MNK1b, MNK2a and/or MNK2b inhibitor. The dual PI3K/mTOR inhibitor can be, e.g., PF-04695102.

[0988] In one embodiment of the methods or uses described herein, the kinase inhibitor is a CDK4 inhibitor selected from aloisine A; flavopiridol or HMR-1275, 2-(2-chlorophenyl)-5,7-dihydroxy-8-[(3S,4R)-3-hydroxy-1-methyl-4-piperidinyl]-4-chromenone; crizotinib (PF-02341066; 2-(2-Chlorophenyl)-5,7-dihydroxy-8-[(2R,3S)-2-(hydroxymethyl)-1-methyl-3-pyrrolidinyl]-4H-1-benzopyran-4-one, hydrochloride (P276-00); 1-methyl-5-[[2-[5-(trifluoromethyl)-1H-imidazol-2-yl]-4-pyridinyl]oxy]-N-[4-(trifluoromethyl)phenyl]-1H-benzimidazol-2-amine (RAF265); indisulam (E7070); roscovitine (CYC202); palbociclib (PD0332991); dinaciclib (SCH727965); N-[5-[[(5-tert-butyloxazol-2-yl)methyl]thio]thiazol-2-yl]piperidine-4-carboxamide (BMS 387032); 4-[9-chloro-7-(2,6-difluorophenyl)-5H-pyrimido[5,4-d][2] benzazepin-2-yl]amino]-benzoic acid (MLN8054); 5-[3-(4,6-difluoro-1H-benzimidazol-2-yl)-1H-indazol-5-yl]-N-ethyl-4-methyl-3-pyridinemethanamine (AG-024322); 4-(2,6-dichlorobenzoylamino)-1H-pyrazole-3-carboxylic acid N-(piperidin-4-yl)amide (AT7519); 4-[2-methyl-1-(1-methylethyl)-1H-imidazol-5-yl]-N-[4-(methylsulfonyl)phenyl]-2-pyrimidinamine (AZD5438); and XL281 (BMS908662).

[0989] In one embodiment of the methods or uses described herein, the kinase inhibitor is a CDK4 inhibitor, e.g., palbociclib (PD0332991), and the palbociclib is administered at a dose of about 50 mg, 60 mg, 70 mg, 75 mg, 80 mg, 90 mg, 100 mg, 105 mg, 110 mg, 115 mg, 120 mg, 125 mg, 130 mg, 135 mg (e.g., 75 mg, 100 mg or 125 mg) daily for a period of time, e.g., daily for 14-21 days of a 28 day cycle, or daily for 7-12 days of a 21 day cycle. In one embodiment, 1, 2, 3, 4, 5, 6, 7, 8, 9, 10, 11, 12 or more cycles of palbociclib are administered.

[0990] In one embodiment of the methods or uses described herein, the kinase inhibitor is a BTK inhibitor selected from ibrutinib (PCI-32765); GDC-0834; RN-486; CGI-560; CGI-1764; HM-71224; CC-292; ONO-4059; CNX-774; and LFM-A13. In one embodiment, the BTK inhibitor does not reduce or inhibit the kinase activity of interleukin-2-inducible kinase (ITK), and is selected from GDC-0834; RN-486; CGI-560; CGI-1764; HM-71224; CC-292; ONO-4059; CNX-774; and LFM-A13.

[0991] In one embodiment of the methods or uses described herein, the kinase inhibitor is a BTK inhibitor, e.g., ibrutinib (PCI-32765), and the ibrutinib is administered at a dose of about 250 mg, 300 mg, 350 mg, 400 mg, 420 mg, 440 mg, 460 mg, 480 mg, 500 mg, 520 mg, 540 mg, 560 mg, 580 mg, 600 mg (e.g., 250 mg, 420 mg or 560 mg) daily for a period of time, e.g., daily for 21 day cycle, or daily for 28 day cycle. In one embodiment, 1, 2, 3, 4, 5, 6, 7, 8, 9, 10, 11, 12 or more cycles of ibrutinib are administered.

[0992] In one embodiment of the methods or uses described herein, the kinase inhibitor is a BTK inhibitor that does not inhibit the kinase activity of ITK, e.g., RN-486, and RN-486 is administered at a dose of about 100 mg, 110 mg, 120 mg, 130 mg, 140 mg, 150 mg, 160 mg, 170 mg, 180 mg, 190 mg, 200 mg, 210 mg, 220 mg, 230 mg, 240 mg, 250 mg (e.g., 150 mg, 200 mg or 250 mg) daily for a period of time, e.g., daily a 28 day cycle. In one embodiment, 1, 2, 3, 4, 5, 6, 7, or more cycles of RN-486 are administered.

[0993] In one embodiment of the methods or uses described herein, the kinase inhibitor is an mTOR inhibitor selected from temsirolimus; ridaforolimus (1R,2R,4S)-4-[(2R)-2 [(1R,9S,12S,15R,16E,18R,19R,21R, 23S,24E,26E,28Z,30S,32S,35R)-1,18-dihydroxy-19,30-dimethoxy-15,17,21,23, 29,35-hexamethyl-2,3,10,14,20-pentaoxo-11,36-dioxa-4-azatricyclo[30.3.1.0^{4,9}]hexatriaconta-16,24,26,28-tetraen-12-yl]propyl]-2-methoxycyclohexyl dimethylphosphinate, also known as AP23573 and MK8669; everolimus (RAD001); rapamycin (AY22989); simapimod; (5-{2,4-bis [(3S)-3-methylmorpholin-4-yl]pyrido[2,3-d]pyrimidin-7-yl}-2-methoxyphenyl) methanol (AZD8055); 2-amino-8-[trans-4-(2-hydroxyethoxy)cyclohexyl]-6-(6-methoxy-3-pyridinyl)-4-methyl-pyrido[2,3-d]pyrimidin-7 (8H)-one (PF04691502); and N2-[1,4-dioxo-4-[[4-(4-oxo-8-phenyl-4H-1-benzopyran-2-yl) morpholinium-4-yl]methoxy] butyl]-L-arginylglycyl-L-a-aspartyIL-serine-(SEQ ID NO: 112), inner salt (SF1126); and XL765.

[0994] In one embodiment of the methods or uses described herein, the kinase inhibitor is an mTOR inhibitor, e.g., rapamycin, and the rapamycin is administered at a dose of about 3 mg, 4 mg, 5 mg, 6 mg, 7 mg, 8 mg, 9 mg, 10 mg (e.g., 6 mg) daily for a period of time, e.g., daily for 21 day cycle, or daily for 28 day cycle. In one embodiment, 1, 2, 3, 4, 5, 6, 7, 8, 9, 10, 11, 12 or more cycles of rapamycin are administered. In one embodiment, the kinase inhibitor is an mTOR inhibitor, e.g., everolimus and the everolimus is administered at a dose of about 2 mg, 2.5 mg, 3 mg, 4 mg, 5 mg, 6 mg, 7 mg, 8 mg, 9 mg, 10 mg, 11 mg, 12 mg, 13 mg, 14 mg, 15 mg (e.g., 10 mg) daily for a period of time, e.g., daily for 28 day cycle. In one embodiment, 1, 2, 3, 4, 5, 6, 7, 8, 9, 10, 11, 12 or more cycles of everolimus are administered.

[0995] In one embodiment of the methods or uses described herein, the kinase inhibitor is an MNK inhibitor selected from CGP052088; 4-amino-3-(p-fluorophenylamino)-pyrazolo [3,4-d]pyrimidine (CGP57380); cercosporamide; ETC-1780445-2; and 4-amino-5-(4-fluoroanilino)-pyrazolo[3,4-d]pyrimidine.

[0996] In one embodiment of the methods or uses described herein, the kinase inhibitor is a dual phosphatidylinositol 3-kinase (PI3K) and mTOR inhibitor selected from 2-Amino-8-[trans-4-(2-hydroxyethoxy)cyclohexyl]-6-(6-methoxy-3-pyridinyl)-4-methyl-pyrido[2,3-d]pyrimidin-7 (8H)-one (PF-04691502); N-[4-[[4-(Dimethylamino)-1-piperidinyl] carbonyl]phenyl]-N′-[4-(4,6-di-4-morpholinyl-1,3,5-triazin-2-yl)phenyl] urea (PF-05212384, PKI-587); 2-Methyl-2-{4-[3-methyl-2-oxo-8-(quinolin-3-yl)-2,3-dihydro-1H-imidazo[4,5-c]quinolin-1-yl]phenyl}propanenitrile (BEZ-235); apitolisib (GDC-0980, RG7422); 2,4-Difluoro-N-{2-(methyloxy)-5-[4-(4-pyridazinyl)-6-quinolinyl]-3-pyridinyl}benzenesulfonamide (GSK2126458); 8-(6-methoxypyridin-3-yl)-3-methyl-1-(4-(piperazin-1-yl)-3-(trifluoromethyl)phenyl)-1H-imidazo[4,5-c]quinolin-2 (3H)-one Maleic acid (NVP-BGT226); 3-[4-(4-Morpholinylpyrido[3′,2′: 4,5] furo [3,2-d]pyrimidin-2-yl]phenol (PI-103); 5-(9-isopropyl-8-methyl-2-morpholino-9H-purin-6-yl)pyrimidin-2-amine (VS-5584, SB2343); and N-[2-[(3,5-Dimethoxyphenyl)amino] quinoxalin-3-yl]-4-[(4-methyl-3-methoxyphenyl) carbonyl]aminophenylsulfonamide (XL765).

[0997] In one embodiment of the methods or uses described herein, an anti-target CAR expressing immune effector cell described herein is administered to a subject in combination with a protein tyrosine phosphatase inhibitor, e.g., a protein tyrosine phosphatase inhibitor described herein. In one embodiment, the protein tyrosine phosphatase inhibitor is an SHP-1 inhibitor, e.g., an SHP-1 inhibitor described herein, such as, e.g., sodium stibogluconate. In one embodiment, the protein tyrosine phosphatase inhibitor is an SHP-2 inhibitor.

[0998] In one embodiment of the methods or uses described herein, the anti-target CAR molecule is administered in combination with another agent, and the agent is a cytokine. The cytokine can be, e.g., IL-7, IL-15, IL-21, or a combination thereof. In another embodiment, the CAR molecule is administered in combination with a checkpoint inhibitor, e.g., a checkpoint inhibitor described herein. For example, in one embodiment, the check point inhibitor inhibits an inhibitory molecule selected from PD-1, PD-L1, CTLA-4, TIM-3, CEACAM (e.g., CEACAM-1, CEACAM-3 and/or CEACAM-5), LAG-3, VISTA, BTLA, TIGIT, LAIR1, CD160, 2B4 and TGF beta.

[0999] In further aspects, an anti-target CAR-expressing cell described herein may be used in a treatment regimen in combination with surgery, chemotherapy, radiation, immunosuppressive agents, such as cyclosporin, azathioprine, methotrexate, mycophenolate, and FK506, antibodies, or other immunoablative agents such as CAMPATH, anti-CD3 antibodies or other antibody therapies, cytoxin, fludarabine, cyclosporin, FK506, rapamycin, mycophenolic acid, steroids, FR901228, cytokines, and irradiation. peptide vaccine, such as that described in Izumoto et al. 2008 J Neurosurg 108:963-971.

[1000] In one embodiment, am anti-target CAR-expressing cell described herein can be used in combination with a chemotherapeutic agent. Exemplary chemotherapeutic agents include an anthracycline (e.g., doxorubicin (e.g., liposomal doxorubicin)). a vinca alkaloid (e.g., vinblastine, vincristine, vindesine, vinorelbine), an alkylating agent (e.g., cyclophosphamide, decarbazine, melphalan, ifosfamide, temozolomide), an immune cell antibody (e.g., alemtuzamab, gemtuzumab, rituximab, ofatumumab, tositumomab, brentuximab), an antimetabolite (including, e.g., folic acid antagonists, pyrimidine analogs, purine analogs and adenosine deaminase inhibitors (e.g., fludarabine)), an mTOR inhibitor, a TNFR glucocorticoid induced TNFR related protein (GITR) agonist, a proteasome inhibitor (e.g., aclacinomycin A, gliotoxin or bortezomib), an immunomodulator such as thalidomide or a thalidomide derivative (e.g., lenalidomide).

[1001] General Chemotherapeutic agents considered for use in combination therapies include anastrozole (Arimidex®), bicalutamide (Casodex®), bleomycin sulfate (Blenoxane®), busulfan (Myleran®), busulfan injection (Busulfex®), capecitabine (Xeloda®), N4-pentoxycarbonyl-5-deoxy-5-fluorocytidine, carboplatin (Paraplatin®), carmustine (BiCNU®), chlorambucil (Leukeran®), cisplatin (Platinol®), cladribine (Leustatin®), cyclophosphamide (Cytoxan® or Neosar®), cytarabine, cytosine arabinoside (Cytosar-U®), cytarabine liposome injection (DepoCyt®), dacarbazine (DTIC-Dome®), dactinomycin (Actinomycin D, Cosmegan), daunorubicin hydrochloride (Cerubidine®), daunorubicin citrate liposome injection (DaunoXome®), dexamethasone, docetaxel (Taxotere®), doxorubicin hydrochloride (Adriamycin®, Rubex®), etoposide (Vepesid®), fludarabine phosphate (Fludara®), 5-fluorouracil (Adrucil®, Efudex®), flutamide (Eulexin®), tezacitibine, Gemcitabine (difluorodeoxycitidine), hydroxyurea (Hydrea®), Idarubicin (Idamycin®), ifosfamide (IFEX®), irinotecan (Camptosar®), L-asparaginase (ELSPAR®), leucovorin calcium, melphalan (Alkeran®), 6-mercaptopurine (Purinethol®), methotrexate (Folex®), mitoxantrone (Novantrone®), mylotarg, paclitaxel (Taxol®), phoenix (Yttrium90/MX-DTPA), pentostatin, polifeprosan 20 with carmustine implant (Gliadel®), tamoxifen citrate (Nolvadex®), teniposide (Vumon®), 6-thioguanine, thiotepa, tirapazamine (Tirazone®), topotecan hydrochloride for injection (Hycamptin®), vinblastine (Velban®), vincristine (Oncovin®), and vinorelbine (Navelbine®).

[1002] Exemplary alkylating agents include, without limitation, nitrogen mustards, ethylenimine derivatives, alkyl sulfonates, nitrosoureas and triazenes): uracil mustard (Aminouracil Mustard®, Chlorethaminacil®, Demethyldopan®, Desmethyldopan®, Haemanthamine®, Nordopan®, Uracil nitrogen mustard®, Uracillost®, Uracilmostaza®, Uramustin®, Uramustine®), chlormethine (Mustargen®), cyclophosphamide (Cytoxan®, Neosar®, Clafen®, Endoxan®, Procytox®, Revimmune™), ifosfamide (Mitoxana®), melphalan (Alkeran®), Chlorambucil (Leukeran®), pipobroman (Amedel®, Vercyte®), triethylenemelamine (Hemel®, Hexalen®, Hexastat®), triethylenethiophosphoramine, Temozolomide (Temodar®), thiotepa (Thioplex®), busulfan (Busilvex®, Myleran®), carmustine (BiCNU®), lomustine (CeeNU®), streptozocin (Zanosar®), and Dacarbazine (DTIC-Dome®). Additional exemplary alkylating agents include, without limitation, Oxaliplatin (Eloxatin®); Temozolomide (Temodar® and Temodal®); Dactinomycin (also known as actinomycin-D, Cosmegen®); Melphalan (also known as L-PAM, L-sarcolysin, and phenylalanine mustard, Alkeran®); Altretamine (also known as hexamethylmelamine (HMM), Hexalen®); Carmustine (BiCNU®); Bendamustine (Treanda®); Busulfan (Busulfex® and Myleran®); Carboplatin (Paraplatin®); Lomustine (also known as CCNU, CeeNUR); Cisplatin (also known as CDDP, Platinol® and Platinol®-AQ); Chlorambucil (Leukeran®); Cyclophosphamide (Cytoxan® and Neosar®); Dacarbazine (also known as DTIC, DIC and imidazole carboxamide, DTIC-Dome®); Altretamine (also known as hexamethylmelamine (HMM), Hexalen®); Ifosfamide (Ifex®); Prednumustine; Procarbazine (Matulane®); Mechlorethamine (also known as nitrogen mustard, mustine and mechloroethamine hydrochloride, Mustargen®); Streptozocin (Zanosar®); Thiotepa (also known as thiophosphoamide, TESPA and TSPA, Thioplex®); Cyclophosphamide (Endoxan®, Cytoxan®, Neosar®, Procytox®, Revimmune®); and Bendamustine HCl (Treanda®).

[1003] In embodiments, an anti-target CAR-expressing cell described herein is administered to a subject in combination with fludarabine, cyclophosphamide, and/or rituximab. In embodiments, an anti-target CAR-expressing cell described herein is administered to a subject in combination with fludarabine, cyclophosphamide, and rituximab (FCR). In embodiments, the subject has CLL. For example, the subject has a deletion in the short arm of chromosome 17 (del (17p), e.g., in a leukemic cell). In other examples, the subject does not have a del (17p). In embodiments, the subject comprises a leukemic cell comprising a mutation in the immunoglobulin heavy-chain variable-region (IgV_{H}) gene. In other embodiments, the subject does not comprise a leukemic cell comprising a mutation in the immunoglobulin heavy-chain variable-region (IgV_{H}) gene. In embodiments, the fludarabine is administered at a dosage of about 10-50 mg/m² (e.g., about 10-15, 15-20, 20-25, 25-30, 30-35, 35-40, 40-45, or 45-50 mg/m²), e.g., intravenously. In embodiments, the cyclophosphamide is administered at a dosage of about 200-300 mg/m² (e.g., about 200-225, 225-250, 250-275, or 275-300 mg/m²), e.g., intravenously. In embodiments, the rituximab is administered at a dosage of about 400-600 mg/m² (e.g., 400-450, 450-500, 500-550, or 550-600 mg/m²), e.g., intravenously.

[1004] In embodiments, an anti-target CAR-expressing cell described herein is administered to a subject in combination with bendamustine and rituximab. In embodiments, the subject has CLL. For example, the subject has a deletion in the short arm of chromosome 17 (del (17p), e.g., in a leukemic cell). In other examples, the subject does not have a del (17p). In embodiments, the subject comprises a leukemic cell comprising a mutation in the immunoglobulin heavy-chain variable-region (IgV_{H}) gene. In other embodiments, the subject does not comprise a leukemic cell comprising a mutation in the immunoglobulin heavy-chain variable-region (IgV_{H}) gene. In embodiments, the bendamustine is administered at a dosage of about 70-110 mg/m² (e.g., 70-80, 80-90, 90-100, or 100-110 mg/m²), e.g., intravenously. In embodiments, the rituximab is administered at a dosage of about 400-600 mg/m² (e.g., 400-450, 450-500, 500-550, or 550-600 mg/m²), e.g., intravenously.

[1005] In embodiments, an anti-target CAR-expressing cell described herein is administered to a subject in combination with rituximab, cyclophosphamide, doxorubicine, vincristine, and/or a corticosteroid (e.g., prednisone). In embodiments, a CAR-expressing cell described herein is administered to a subject in combination with rituximab, cyclophosphamide, doxorubicine, vincristine, and prednisone (R-CHOP). In embodiments, the subject has diffuse large B-cell lymphoma (DLBCL). In embodiments, the subject has nonbulky limited-stage DLBCL (e.g., comprises a tumor having a size/diameter of less than 7 cm). In embodiments, the subject is treated with radiation in combination with the R-CHOP. For example, the subject is administered R-CHOP (e.g., 1-6 cycles, e.g., 1, 2, 3, 4, 5, or 6 cycles of R-CHOP), followed by radiation. In some cases, the subject is administered R-CHOP (e.g., 1-6 cycles, e.g., 1, 2, 3, 4, 5, or 6 cycles of R-CHOP) following radiation.

[1006] In embodiments, an anti-target CAR-expressing cell described herein is administered to a subject in combination with etoposide, prednisone, vincristine, cyclophosphamide, doxorubicin, and/or rituximab. In embodiments, an anti-target CAR-expressing cell described herein is administered to a subject in combination with etoposide, prednisone, vincristine, cyclophosphamide, doxorubicin, and rituximab (EPOCH-R). In embodiments, an anti-target CAR-expressing cell described herein is administered to a subject in combination with dose-adjusted EPOCH-R (DA-EPOCH-R). In embodiments, the subject has a B cell lymphoma, e.g., a Myc-rearranged aggressive B cell lymphoma.

[1007] In embodiments, an anti-target CAR-expressing cell described herein is administered to a subject in combination with rituximab and/or lenalidomide. Lenalidomide ((RS)-3-(4-Amino-1-oxo 1,3-dihydro-2H-isoindol-2-yl) piperidine-2,6-dione) is an immunomodulator. In embodiments, a CAR-expressing cell described herein is administered to a subject in combination with rituximab and lenalidomide. In embodiments, the subject has follicular lymphoma (FL) or mantle cell lymphoma (MCL). In embodiments, the subject has FL and has not previously been treated with a cancer therapy. In embodiments, lenalidomide is administered at a dosage of about 10-20 mg (e.g., 10-15 or 15-20 mg), e.g., daily. In embodiments, rituximab is administered at a dosage of about 350-550 mg/m² (e.g., 350-375, 375-400, 400-425, 425-450, 450-475, or 475-500 mg/m²), e.g., intravenously.

[1008] Exemplary mTOR inhibitors include, e.g., temsirolimus; ridaforolimus (formally known as deferolimus, (1R,2R,4S)-4-[(2R)-2 [(1R,9S,12S,15R,16E,18R,19R,21R, 23S,24E,26E,28Z,30S,32S,35R)-1,18-dihydroxy-19,30-dimethoxy-15,17,21,23, 29,35-hexamethyl-2,3,10,14,20-pentaoxo-11,36-dioxa-4-azatricyclo[30.3.1.0^{4,9}]hexatriaconta-16,24,26,28-tetraen-12-yl]propyl]-2-methoxycyclohexyl dimethylphosphinate, also known as AP23573 and MK8669, and described in PCT Publication No. WO 03/064383); everolimus (Afinitor® or RAD001); rapamycin (AY22989, Sirolimus®); simapimod (CAS 164301-51-3); emsirolimus, (5-{2,4-Bis [(3S)-3-methylmorpholin-4-yl]pyrido[2,3-d]pyrimidin-7-yl}-2-methoxyphenyl) methanol (AZD8055); 2-Amino-8-[trans-4-(2-hydroxyethoxy)cyclohexyl]-6-(6-methoxy-3-pyridinyl)-4-methyl-pyrido[2,3-d]pyrimidin-7 (8H)-one (PF04691502, CAS 1013101-36-4); and N2-[1,4-dioxo-4-[4-(4-oxo-8-phenyl-4H-1-benzopyran-2-yl) morpholinium-4-yl]methoxy] butyl]-L-arginylglycyl-L-a-aspartyIL-serine-(SEQ ID NO: 112), inner salt (SF1126, CAS 936487-67-1), and XL765.

[1009] Exemplary immunomodulators include, e.g., afutuzumab (available from Roche®); pegfilgrastim (Neulasta®); lenalidomide (CC-5013, Revlimid®); thalidomide (Thalomid®), actimid (CC4047); and IRX-2 (mixture of human cytokines including interleukin 1, interleukin 2, and interferon γ, CAS 951209-71-5, available from IRX Therapeutics).

[1010] Exemplary anthracyclines include, e.g., doxorubicin (Adriamycin® and Rubex®); bleomycin (lenoxane®); daunorubicin (dauorubicin hydrochloride, daunomycin, and rubidomycin hydrochloride, Cerubidine®); daunorubicin liposomal (daunorubicin citrate liposome, DaunoXome®); mitoxantrone (DHAD, Novantrone®); epirubicin (Ellence™); idarubicin (Idamycin®, Idamycin PFS®); mitomycin C (Mutamycin®); geldanamycin; herbimycin; ravidomycin; and desacetylravidomycin.

[1011] Exemplary vinca alkaloids include, e.g., vinorelbine tartrate (Navelbine®), Vincristine (Oncovin®), and Vindesine (Eldisine®)); vinblastine (also known as vinblastine sulfate, vincaleukoblastine and VLB, Alkaban-AQ® and Velban®); and vinorelbine (Navelbine®).

[1012] Exemplary proteosome inhibitors include bortezomib (Velcade®); carfilzomib (PX-171-007, (S)-4-Methyl-N-((S)-1-(((S)-4-methyl-1-((R)-2-methyloxiran-2-yl)-1-oxopentan-2-yl)amino)-1-oxo-3-phenylpropan-2-yl)-2-((S)-2-(2-morpholinoacetamido)-4-phenylbutanamido)-pentanamide); marizomib (NPI-0052); ixazomib citrate (MLN-9708); delanzomib (CEP-18770); and O-Methyl-N-[(2-methyl-5-thiazolyl) carbonyl]-L-seryl-O-methyl-N-[(1S)-2-[(2R)-2-methyl-2-oxiranyl]-2-oxo-1-(phenylmethyl)ethyl]-L-serinamide (ONX-0912).

[1013] In embodiments, an anti-target CAR-expressing cell described herein is administered to a subject in combination with brentuximab. Brentuximab is an antibody-drug conjugate of anti-CD30 antibody and monomethyl auristatin E. In embodiments, the subject has Hodgkin's lymphoma (HL), e.g., relapsed or refractory HL. In embodiments, the subject comprises CD30+HL. In embodiments, the subject has undergone an autologous stem cell transplant (ASCT). In embodiments, the subject has not undergone an ASCT. In embodiments, brentuximab is administered at a dosage of about 1-3 mg/kg (e.g., about 1-1.5, 1.5-2, 2-2.5, or 2.5-3 mg/kg), e.g., intravenously, e.g., every 3 weeks.

[1014] In embodiments, an anti-target CAR-expressing cell described herein is administered to a subject in combination with brentuximab and dacarbazine or in combination with brentuximab and bendamustine. Dacarbazine is an alkylating agent with a chemical name of 5-(3,3-Dimethyl-1-triazenyl) imidazole-4-carboxamide. Bendamustine is an alkylating agent with a chemical name of 4-[5-[Bis (2-chloroethyl)amino]-1-methylbenzimidazol-2-yl] butanoic acid. In embodiments, the subject has Hodgkin's lymphoma (HL). In embodiments, the subject has not previously been treated with a cancer therapy. In embodiments, the subject is at least 60 years of age, e.g., 60, 65, 70, 75, 80, 85, or older. In embodiments, dacarbazine is administered at a dosage of about 300-450 mg/m² (e.g., about 300-325, 325-350, 350-375, 375-400, 400-425, or 425-450 mg/m²), e.g., intravenously. In embodiments, bendamustine is administered at a dosage of about 75-125 mg/m² (e.g., 75-100 or 100-125 mg/m², e.g., about 90 mg/m²), e.g., intravenously. In embodiments, brentuximab is administered at a dosage of about 1-3 mg/kg (e.g., about 1-1.5, 1.5-2, 2-2.5, or 2.5-3 mg/kg), e.g., intravenously, e.g., every 3 weeks.

[1015] In some embodiments, an anti-target CAR-expressing cell described herein is administered to a subject in combination with a CD20 inhibitor, e.g., an anti-CD20 antibody (e.g., an anti-CD20 mono- or bispecific antibody) or a fragment thereof. Exemplary anti-CD20 antibodies include but are not limited to rituximab, ofatumumab, ocrelizumab, veltuzumab, obinutuzumab, TRU-015 (Trubion Pharmaceuticals), ocaratuzumab, and Pro131921 (Genentech). See, e.g., Lim et al. Haematologica. 95.1 (2010): 135-43.

[1016] In some embodiments, the anti-CD20 antibody comprises rituximab. Rituximab is a chimeric mouse/human monoclonal antibody IgG1 kappa that binds to CD20 and causes cytolysis of a CD20 expressing cell, e.g., as described in www.accessdata.fda.gov/drugsatfda_docs/label/2010/103705s5311lbl.pdf. In embodiments, a CAR-expressing cell described herein is administered to a subject in combination with rituximab. In embodiments, the subject has CLL or SLL.

[1017] In some embodiments, rituximab is administered intravenously, e.g., as an intravenous infusion. For example, each infusion provides about 500-2000 mg (e.g., about 500-550, 550-600, 600-650, 650-700, 700-750, 750-800, 800-850, 850-900, 900-950, 950-1000, 1000-1100, 1100-1200, 1200-1300, 1300-1400, 1400-1500, 1500-1600, 1600-1700, 1700-1800, 1800-1900, or 1900-2000 mg) of rituximab. In some embodiments, rituximab is administered at a dose of 150 mg/m² to 750 mg/m², e.g., about 150-175 mg/m², 175-200 mg/m², 200-225 mg/m², 225-250 mg/m², 250-300 mg/m², 300-325 mg/m², 325-350 mg/m², 350-375 mg/m², 375-400 mg/m², 400-425 mg/m², 425-450 mg/m², 450-475 mg/m², 475-500 mg/m², 500-525 mg/m², 525-550 mg/m², 550-575 mg/m², 575-600 mg/m², 600-625 mg/m², 625-650 mg/m², 650-675 mg/m², or 675-700 mg/m², where m² indicates the body surface area of the subject. In some embodiments, rituximab is administered at a dosing interval of at least 4 days, e.g., 4, 7, 14, 21, 28, 35 days, or more. For example, rituximab is administered at a dosing interval of at least 0.5 weeks, e.g., 0.5, 1, 2, 3, 4, 5, 6, 7, 8 weeks, or more. In some embodiments, rituximab is administered at a dose and dosing interval described herein for a period of time, e.g., at least 2 weeks, e.g., at least 2, 3, 4, 5, 6, 7, 8, 9, 10, 11, 12, 13, 14, 15, 16, 17, 18, 19, 20 weeks, or greater. For example, rituximab is administered at a dose and dosing interval described herein for a total of at least 4 doses per treatment cycle (e.g., at least 4, 5, 6, 7, 8, 9, 10, 11, 12, 13, 14, 15, 16, or more doses per treatment cycle).

[1018] In some embodiments, the anti-CD20 antibody comprises ofatumumab. Ofatumumab is an anti-CD20 IgG1κ human monoclonal antibody with a molecular weight of approximately 149 kDa. For example, ofatumumab is generated using transgenic mouse and hybridoma technology and is expressed and purified from a recombinant murine cell line (NSO). See, e.g., www.accessdata.fda.gov/drugsatfda_docs/label/2009/125326lbl.pdf; and Clinical Trial Identifier number NCT01363128, NCT01515176, NCT01626352, and NCT01397591. In embodiments, a CAR-expressing cell described herein is administered to a subject in combination with ofatumumab. In embodiments, the subject has CLL or SLL.

[1019] In some embodiments, ofatumumab is administered as an intravenous infusion. For example, each infusion provides about 150-3000 mg (e.g., about 150-200, 200-250, 250-300, 300-350, 350-400, 400-450, 450-500, 500-550, 550-600, 600-650, 650-700, 700-750, 750-800, 800-850, 850-900, 900-950, 950-1000, 1000-1200, 1200-1400, 1400-1600, 1600-1800, 1800-2000, 2000-2200, 2200-2400, 2400-2600, 2600-2800, or 2800-3000 mg) of ofatumumab. In embodiments, ofatumumab is administered at a starting dosage of about 300 mg, followed by 2000 mg, e.g., for about 11 doses, e.g., for 24 weeks. In some embodiments, ofatumumab is administered at a dosing interval of at least 4 days, e.g., 4, 7, 14, 21, 28, 35 days, or more. For example, ofatumumab is administered at a dosing interval of at least 1 week, e.g., 1, 2, 3, 4, 5, 6, 7, 8, 9, 10, 11, 12, 24, 26, 28, 20, 22, 24, 26, 28, 30 weeks, or more. In some embodiments, ofatumumab is administered at a dose and dosing interval described herein for a period of time, e.g., at least 1 week, e.g., 1, 2, 3, 4, 5, 6, 7, 8, 9, 10, 11, 12, 13, 14, 15, 16, 17, 18, 19, 20, 22, 24, 26, 28, 30, 40, 50, 60 weeks or greater, or 1, 2, 3, 4, 5, 6, 7, 8, 9, 10, 11, 12 months or greater, or 1, 2, 3, 4, 5 years or greater. For example, ofatumumab is administered at a dose and dosing interval described herein for a total of at least 2 doses per treatment cycle (e.g., at least 2, 3, 4, 5, 6, 7, 8, 9, 10, 11, 12, 13, 14, 15, 16, 18, 20, or more doses per treatment cycle).

[1020] In some cases, the anti-CD20 antibody comprises ocrelizumab. Ocrelizumab is a humanized anti-CD20 monoclonal antibody, e.g., as described in Clinical Trials Identifier Nos. NCT00077870, NCT01412333, NCT00779220, NCT00673920, NCT01194570, and Kappos et al. Lancet. 19.378 (2011): 1779-87.

[1021] In some cases, the anti-CD20 antibody comprises veltuzumab. Veltuzumab is a humanized monoclonal antibody against CD20. See, e.g., Clinical Trial Identifier No. NCT00547066, NCT00546793, NCT01101581, and Goldenberg et al. Leuk Lymphoma. 51 (5) (2010): 747-55.

[1022] In some cases, the anti-CD20 antibody comprises GA101. GA101 (also called obinutuzumab or RO5072759) is a humanized and glyco-engineered anti-CD20 monoclonal antibody. See, e.g., Robak. Curr. Opin. Investig. Drugs. 10.6 (2009): 588-96; Clinical Trial Identifier Numbers: NCT01995669, NCT01889797, NCT02229422, and NCT01414205; and www.accessdata.fda.gov/drugsatfda_docs/label/2013/125486s000lbl.pdf.

[1023] In some cases, the anti-CD20 antibody comprises AME-133v. AME-133v (also called LY2469298 or ocaratuzumab) is a humanized IgG1 monoclonal antibody against CD20 with increased affinity for the FcγRIIIa receptor and an enhanced antibody dependent cellular cytotoxicity (ADCC) activity compared with rituximab. See, e.g., Robak et al. BioDrugs 25.1 (2011): 13-25; and Forero-Torres et al. Clin Cancer Res. 18.5 (2012): 1395-403.

[1024] In some cases, the anti-CD20 antibody comprises PRO131921. PRO131921 is a humanized anti-CD20 monoclonal antibody engineered to have better binding to FcγRIIIa and enhanced ADCC compared with rituximab. See, e.g., Robak et al. BioDrugs 25.1 (2011): 13-25; and Casulo et al. Clin Immunol. 154.1 (2014): 37-46; and Clinical Trial Identifier No. NCT00452127.

[1025] In some cases, the anti-CD20 antibody comprises TRU-015. TRU-015 is an anti-CD20 fusion protein derived from domains of an antibody against CD20. TRU-015 is smaller than monoclonal antibodies, but retains Fc-mediated effector functions. See, e.g., Robak et al. BioDrugs 25.1 (2011): 13-25. TRU-015 contains an anti-CD20 single-chain variable fragment (scFv) linked to human IgG1 hinge, CH2, and CH3 domains but lacks CH1 and CL domains.

[1026] In some embodiments, an anti-CD20 antibody described herein is conjugated or otherwise bound to a therapeutic agent, e.g., a chemotherapeutic agent (e.g., cytoxan, fludarabine, histone deacetylase inhibitor, demethylating agent, peptide vaccine, anti-tumor antibiotic, tyrosine kinase inhibitor, alkylating agent, anti-microtubule or anti-mitotic agent), anti-allergic agent, anti-nausea agent (or anti-emetic), pain reliever, or cytoprotective agent described herein.

[1027] In embodiments, an anti-target CAR-expressing cell described herein is administered to a subject in combination with a B-cell lymphoma 2 (BCL-2) inhibitor (e.g., venetoclax, also called ABT-199 or GDC-0199;) and/or rituximab. In embodiments, an anti-target CAR-expressing cell described herein is administered to a subject in combination with venetoclax and rituximab. Venetoclax is a small molecule that inhibits the anti-apoptotic protein, BCL-2. The structure of venetoclax (4-(4- {[2-(4-chlorophenyl)-4,4-dimethylcyclohex-1-en-1-yl]methyl}piperazin-1-yl)-N-({3-nitro-4-[(tetrahydro-2H-pyran-4-ylmethyl)amino]phenyl}sulfonyl)-2-(1H-pyrrolo[2,3-b]pyridin-5-yloxy)benzamide) is shown below.

[chemical structure]

[1028] In embodiments, the subject has CLL. In embodiments, the subject has relapsed CLL, e.g., the subject has previously been administered a cancer therapy. In embodiments, venetoclax is administered at a dosage of about 15-600 mg (e.g., 15-20, 20-50, 50-75, 75-100, 100-200, 200-300, 300-400, 400-500, or 500-600 mg), e.g., daily. In embodiments, rituximab is administered at a dosage of about 350-550 mg/m² (e.g., 350-375, 375-400, 400-425, 425-450, 450-475, or 475-500 mg/m²), e.g., intravenously, e.g., monthly

[1029] In an embodiment, cells expressing an anti-target CAR described herein are administered to a subject in combination with a molecule that decreases the Treg cell population. Methods that decrease the number of (e.g., deplete) Treg cells are known in the art and include, e.g., CD25 depletion, cyclophosphamide administration, modulating GITR function. Without wishing to be bound by theory, it is believed that reducing the number of Treg cells in a subject prior to apheresis or prior to administration of an anti-target CAR-expressing cell described herein reduces the number of unwanted immune cells (e.g., Tregs) in the tumor microenvironment and reduces the subject's risk of relapse. In one embodiment, cells expressing an anti-target CAR described herein are administered to a subject in combination with a molecule targeting GITR and/or modulating GITR functions, such as a GITR agonist and/or a GITR antibody that depletes regulatory T cells (Tregs). In embodiments, cells expressing an anti-target CAR described herein are administered to a subject in combination with cyclophosphamide. In one embodiment, the GITR binding molecules and/or molecules modulating GITR functions (e.g., GITR agonist and/or Treg depleting GITR antibodies) are administered prior to administration of the CAR-expressing cell. For example, in one embodiment, the GITR agonist can be administered prior to apheresis of the cells. In embodiments, cyclophosphamide is administered to the subject prior to administration (e.g., infusion or re-infusion) of the anti-target CAR-expressing cell or prior to apheresis of the cells. In embodiments, cyclophosphamide and an anti-GITR antibody are administered to the subject prior to administration (e.g., infusion or re-infusion) of the anti-target CAR-expressing cell or prior to apheresis of the cells. In one embodiment, the subject has cancer (e.g., a solid cancer or a hematological cancer such as ALL or CLL). In an embodiment, the subject has CLL. In embodiments, the subject has ALL. In embodiments, the subject has a solid cancer, e.g., a solid cancer described herein. Exemplary GITR agonists include, e.g., GITR fusion proteins and anti-GITR antibodies (e.g., bivalent anti-GITR antibodies) such as, e.g., a GITR fusion protein described in U.S. Pat. No. 6,111,090, European Patent No.: 090505B1, U.S. Pat. No. 8,586,023, PCT Publication Nos.: WO 2010/003118 and 2011/090754, or an anti-GITR antibody described, e.g., in U.S. Pat. No. 7,025,962, European Patent No.: 1947183B1, U.S. Pat. Nos. 7,812,135, 8,388,967, 8,591,886, European Patent No.: EP 1866339, PCT Publication No.: WO 2011/028683, PCT Publication No.: WO 2013/039954, PCT Publication No.: WO2005/007190, PCT Publication No.: WO 2007/133822, PCT Publication No.: WO2005/055808, PCT Publication No.: WO 99/40196, PCT Publication No.: WO 2001/03720, PCT Publication No.: WO99/20758, PCT Publication No.: WO2006/083289, PCT Publication No.: WO 2005/115451, U.S. Pat. No. 7,618,632, and PCT Publication No.: WO 2011/051726.

[1030] In one embodiment, an anti-target CAR expressing cell described herein is administered to a subject in combination with an mTOR inhibitor, e.g., an mTOR inhibitor described herein, e.g., a rapalog such as everolimus. In one embodiment, the mTOR inhibitor is administered prior to the anti-target CAR-expressing cell. For example, in one embodiment, the mTOR inhibitor can be administered prior to apheresis of the cells. In one embodiment, the subject has CLL.

[1031] In one embodiment, an anti-target CAR expressing cell described herein is administered to a subject in combination with a GITR agonist, e.g., a GITR agonist described herein. In one embodiment, the GITR agonist is administered prior to the anti-target CAR-expressing cell. For example, in one embodiment, the GITR agonist can be administered prior to apheresis of the cells. In one embodiment, the subject has CLL.

[1032] In one embodiment, an anti-target CAR-expressing cell described herein can be used in combination with a kinase inhibitor. In one embodiment, the kinase inhibitor is a CDK4 inhibitor, e.g., a CDK4 inhibitor described herein, e.g., a CD4/6 inhibitor, such as, e.g., 6-Acetyl-8-cyclopentyl-5-methyl-2-(5-piperazin-1-yl-pyridin-2-ylamino)-8H-pyrido[2,3-d]pyrimidin-7-one, hydrochloride (also referred to as palbociclib or PD0332991). In one embodiment, the kinase inhibitor is a BTK inhibitor, e.g., a BTK inhibitor described herein, such as, e.g., ibrutinib. In one embodiment, the kinase inhibitor is an mTOR inhibitor, e.g., an mTOR inhibitor described herein, such as, e.g., rapamycin, a rapamycin analog, OSI-027. The mTOR inhibitor can be, e.g., an mTORC1 inhibitor and/or an mTORC2 inhibitor, e.g., an mTORC1 inhibitor and/or mTORC2 inhibitor described herein. In one embodiment, the kinase inhibitor is a MNK inhibitor, e.g., a MNK inhibitor described herein, such as, e.g., 4-amino-5-(4-fluoroanilino)-pyrazolo[3,4-d]pyrimidine. The MNK inhibitor can be, e.g., a MNKla, MNK1b, MNK2a and/or MNK2b inhibitor. In one embodiment, the kinase inhibitor is a dual PI3K/mTOR inhibitor described herein, such as, e.g., PF-04695102.

[1033] In one embodiment, the kinase inhibitor is a CDK4 inhibitor selected from aloisine A; flavopiridol or HMR-1275, 2-(2-chlorophenyl)-5,7-dihydroxy-8-[(3S,4R)-3-hydroxy-1-methyl-4-piperidinyl]-4-chromenone; crizotinib (PF-02341066; 2-(2-Chlorophenyl)-5,7-dihydroxy-8-[(2R,3S)-2-(hydroxymethyl)-1-methyl-3-pyrrolidinyl]-4H-1-benzopyran-4-one, hydrochloride (P276-00); 1-methyl-5-[2-[5-(trifluoromethyl)-1H-imidazol-2-yl]-4-pyridinyl]oxy]-N-[4-(trifluoromethyl)phenyl]-1H-benzimidazol-2-amine (RAF265); indisulam (E7070); roscovitine (CYC202); palbociclib (PD0332991); dinaciclib (SCH727965); N-[5-[[(5-tert-butyloxazol-2-yl)methyl]thio]thiazol-2-yl]piperidine-4-carboxamide (BMS 387032); 4-[[9-chloro-7-(2,6-difluorophenyl)-5H-pyrimido[5,4-d] [2] benzazepin-2-yl]amino]-benzoic acid (MLN8054); 5-[3-(4,6-difluoro-1H-benzimidazol-2-yl)-1H-indazol-5-yl]-N-ethyl-4-methyl-3-pyridinemethanamine (AG-024322); 4-(2,6-dichlorobenzoylamino)-1H-pyrazole-3-carboxylic acid N-(piperidin-4-yl)amide (AT7519); 4-[2-methyl-1-(1-methylethyl)-1H-imidazol-5-yl]-N-[4-(methylsulfonyl)phenyl]-2-pyrimidinamine (AZD5438); and XL281 (BMS908662).

[1034] In one embodiment, the kinase inhibitor is a CDK4 inhibitor, e.g., palbociclib (PD0332991), and the palbociclib is administered at a dose of about 50 mg, 60 mg, 70 mg, 75 mg, 80 mg, 90 mg, 100 mg, 105 mg, 110 mg, 115 mg, 120 mg, 125 mg, 130 mg, 135 mg (e.g., 75 mg, 100 mg or 125 mg) daily for a period of time, e.g., daily for 14-21 days of a 28 day cycle, or daily for 7-12 days of a 21 day cycle. In one embodiment, 1, 2, 3, 4, 5, 6, 7, 8, 9, 10, 11, 12 or more cycles of palbociclib are administered.

[1035] In embodiments, an anti-target CAR-expressing cell described herein is administered to a subject in combination with a cyclin-dependent kinase (CDK) 4 or 6 inhibitor, e.g., a CDK4 inhibitor or a CDK6 inhibitor described herein. In embodiments, a CAR-expressing cell described herein is administered to a subject in combination with a CDK4/6 inhibitor (e.g., an inhibitor that targets both CDK4 and CDK6), e.g., a CDK4/6 inhibitor described herein. In an embodiment, the subject has MCL. MCL is an aggressive cancer that is poorly responsive to currently available therapies, i.e., essentially incurable. In many cases of MCL, cyclin D1 (a regulator of CDK4/6) is expressed (e.g., due to chromosomal translocation involving immunoglobulin and Cyclin D1 genes) in MCL cells. Thus, without being bound by theory, it is thought that MCL cells are highly sensitive to CDK4/6 inhibition with high specificity (i.e., minimal effect on normal immune cells). CDK4/6 inhibitors alone have had some efficacy in treating MCL, but have only achieved partial remission with a high relapse rate. An exemplary CDK4/6 inhibitor is LEE011 (also called ribociclib), the structure of which is shown below.

[chemical structure]

[1036] Without being bound by theory, it is believed that administration of an anti-target CAR-expressing cell described herein with a CDK4/6 inhibitor (e.g., LEE011 or other CDK4/6 inhibitor described herein) can achieve higher responsiveness, e.g., with higher remission rates and/or lower relapse rates, e.g., compared to a CDK4/6 inhibitor alone.

[1037] In one embodiment, the kinase inhibitor is a BTK inhibitor selected from ibrutinib (PCI-32765); GDC-0834; RN-486; CGI-560; CGI-1764; HM-71224; CC-292; ONO-4059; CNX-774; and LFM-A13. In a preferred embodiment, the BTK inhibitor does not reduce or inhibit the kinase activity of interleukin-2-inducible kinase (ITK), and is selected from GDC-0834; RN-486; CGI-560; CGI-1764; HM-71224; CC-292; ONO-4059; CNX-774; and LFM-A13.

[1038] In one embodiment, the kinase inhibitor is a BTK inhibitor, e.g., ibrutinib (PCI-32765). In embodiments, an anti-target CAR-expressing cell described herein is administered to a subject in combination with a BTK inhibitor (e.g., ibrutinib). In embodiments, an anti-target CAR-expressing cell described herein is administered to a subject in combination with ibrutinib (also called PCI-32765). The structure of ibrutinib (1-[(3R)-3-[4-Amino-3-(4-phenoxyphenyl)-1H-pyrazolo[3,4-d]pyrimidin-1-yl]piperidin-1-yl] prop-2-en-1-one) is shown below.

[chemical structure]

[1039] In embodiments, the subject has CLL, mantle cell lymphoma (MCL), or small lymphocytic lymphoma (SLL). For example, the subject has a deletion in the short arm of chromosome 17 (del (17p), e.g., in a leukemic cell). In other examples, the subject does not have a del (17p). In embodiments, the subject has relapsed CLL or SLL, e.g., the subject has previously been administered a cancer therapy (e.g., previously been administered one, two, three, or four prior cancer therapies). In embodiments, the subject has refractory CLL or SLL. In other embodiments, the subject has follicular lymphoma, e.g., relapse or refractory follicular lymphoma. In some embodiments, ibrutinib is administered at a dosage of about 300-600 mg/day (e.g., about 300-350, 350-400, 400-450, 450-500, 500-550, or 550-600 mg/day, e.g., about 420 mg/day or about 560 mg/day), e.g., orally. In embodiments, the ibrutinib is administered at a dose of about 250 mg, 300 mg, 350 mg, 400 mg, 420 mg, 440 mg, 460 mg, 480 mg, 500 mg, 520 mg, 540 mg, 560 mg, 580 mg, 600 mg (e.g., 250 mg, 420 mg or 560 mg) daily for a period of time, e.g., daily for 21 day cycle, or daily for 28 day cycle. In one embodiment, 1, 2, 3, 4, 5, 6, 7, 8, 9, 10, 11, 12 or more cycles of ibrutinib are administered. Without being bound by theory, it is thought that the addition of ibrutinib enhances the T cell proliferative response and may shift T cells from a T-helper-2 (Th2) to T-helper-1 (Th1) phenotype. Th1 and Th2 are phenotypes of helper T cells, with Th1 versus Th2 directing different immune response pathways. A Th1 phenotype is associated with proinflammatory responses, e.g., for killing cells, such as intracellular pathogens/viruses or cancerous cells, or perpetuating autoimmune responses. A Th2 phenotype is associated with eosinophil accumulation and anti-inflammatory responses.

[1040] In one embodiment, the kinase inhibitor is an mTOR inhibitor selected from temsirolimus; ridaforolimus (1R,2R,4S)-4-[(2R)-2 [(1R,9S,12S,15R,16E,18R,19R,21R, 23S,24E,26E,28Z,30S,32S,35R)-1,18-dihydroxy-19,30-dimethoxy-15,17,21,23, 29,35-hexamethyl-2,3,10,14,20-pentaoxo-11,36-dioxa-4-azatricyclo[30.3.1.0^{4,9}]hexatriaconta-16,24,26,28-tetraen-12-yl]propyl]-2-methoxycyclohexyl dimethylphosphinate, also known as AP23573 and MK8669; everolimus (RAD001); rapamycin (AY22989); simapimod; (5-{2,4-bis [(3S)-3-methylmorpholin-4-yl]pyrido[2,3-d]pyrimidin-7-yl}-2-methoxyphenyl) methanol (AZD8055); 2-amino-8-[trans-4-(2-hydroxyethoxy)cyclohexyl]-6-(6-methoxy-3-pyridinyl)-4-methyl-pyrido[2,3-d]pyrimidin-7 (8H)-one (PF04691502); and N2-[1,4-dioxo-4-[[4-(4-oxo-8-phenyl-4H-1-benzopyran-2-yl) morpholinium-4-yl] methoxy] butyl]-L-arginylglycyl-L-a-aspartyIL-serine-(SEQ ID NO: 112), inner salt (SF1126); and XL765.

[1041] In one embodiment, the kinase inhibitor is an mTOR inhibitor, e.g., rapamycin, and the rapamycin is administered at a dose of about 3 mg, 4 mg, 5 mg, 6 mg, 7 mg, 8 mg, 9 mg, 10 mg (e.g., 6 mg) daily for a period of time, e.g., daily for 21 day cycle, or daily for 28 day cycle. In one embodiment, 1, 2, 3, 4, 5, 6, 7, 8, 9, 10, 11, 12 or more cycles of rapamycin are administered. In one embodiment, the kinase inhibitor is an mTOR inhibitor, e.g., everolimus and the everolimus is administered at a dose of about 2 mg, 2.5 mg, 3 mg, 4 mg, 5 mg, 6 mg, 7 mg, 8 mg, 9 mg, 10 mg, 11 mg, 12 mg, 13 mg, 14 mg, 15 mg (e.g., 10 mg) daily for a period of time, e.g., daily for 28 day cycle. In one embodiment, 1, 2, 3, 4, 5, 6, 7, 8, 9, 10, 11, 12 or more cycles of everolimus are administered.

[1042] In one embodiment, the kinase inhibitor is an MNK inhibitor selected from CGP052088; 4-amino-3-(p-fluorophenylamino)-pyrazolo[3,4-d]pyrimidine (CGP57380); cercosporamide; ETC-1780445-2; and 4-amino-5-(4-fluoroanilino)-pyrazolo[3,4-d] pyrimidine.

[1043] In embodiments, an anti-target CAR-expressing cell described herein is administered to a subject in combination with a phosphoinositide 3-kinase (PI3K) inhibitor (e.g., a PI3K inhibitor described herein, e.g., idelalisib or duvelisib) and/or rituximab. In embodiments, an anti-target CAR-expressing cell described herein is administered to a subject in combination with idelalisib and rituximab. In embodiments, an anti-target CAR-expressing cell described herein is administered to a subject in combination with duvelisib and rituximab. Idelalisib (also called GS-1101 or CAL-101; Gilead) is a small molecule that blocks the delta isoform of PI3K. The structure of idelalisib (5-Fluoro-3-phenyl-2-[(1S)-1-(7H-purin-6-ylamino) propyl]-4 (3H)-quinazolinone) is shown below.

[chemical structure]

[1044] Duvelisib (also called IPI-145; Infinity Pharmaceuticals and Abbvie) is a small molecule that blocks PI3K-δ,γ. The structure of duvelisib (8-Chloro-2-phenyl-3-[(1S)-1-(9H-purin-6-ylamino)ethyl]-1 (2H)-isoquinolinone) is shown below.

[chemical structure]

[1045] In embodiments, the subject has CLL. In embodiments, the subject has relapsed CLL, e.g., the subject has previously been administered a cancer therapy (e.g., previously been administered an anti-CD20 antibody or previously been administered ibrutinib). For example, the subject has a deletion in the short arm of chromosome 17 (del (17p), e.g., in a leukemic cell). In other examples, the subject does not have a del (17p). In embodiments, the subject comprises a leukemic cell comprising a mutation in the immunoglobulin heavy-chain variable-region (IgV_{H}) gene. In other embodiments, the subject does not comprise a leukemic cell comprising a mutation in the immunoglobulin heavy-chain variable-region (IgV_{H}) gene. In embodiments, the subject has a deletion in the long arm of chromosome 11 (del (11q)). In other embodiments, the subject does not have a del (11q). In embodiments, idelalisib is administered at a dosage of about 100-400 mg (e.g., 100-125, 125-150, 150-175, 175-200, 200-225, 225-250, 250-275, 275-300, 325-350, 350-375, or 375-400 mg), e.g., BID. In embodiments, duvelisib is administered at a dosage of about 15-100 mg (e.g., about 15-25, 25-50, 50-75, or 75-100 mg), e.g., twice a day. In embodiments, rituximab is administered at a dosage of about 350-550 mg/m² (e.g., 350-375, 375-400, 400-425, 425-450, 450-475, or 475-500 mg/m²), e.g., intravenously.

[1046] In one embodiment, the kinase inhibitor is a dual phosphatidylinositol 3-kinase (PI3K) and mTOR inhibitor selected from 2-Amino-8-[trans-4-(2-hydroxyethoxy)cyclohexyl]-6-(6-methoxy-3-pyridinyl)-4-methyl-pyrido[2,3-d]pyrimidin-7 (8H)-one (PF-04691502); N-[4-[4-(Dimethylamino)-1-piperidinyl] carbonyl]phenyl]-N′-[4-(4,6-di-4-morpholinyl-1,3,5-triazin-2-yl)phenyl] urea (PF-05212384, PKI-587); 2-Methyl-2-{4-[3-methyl-2-oxo-8-(quinolin-3-yl)-2,3-dihydro-1H-imidazo[4,5-c]quinolin-1-yl] phenyl}propanenitrile (BEZ-235); apitolisib (GDC-0980, RG7422); 2,4-Difluoro-N-{2-(methyloxy)-5-[4-(4-pyridazinyl)-6-quinolinyl]-3-pyridinyl}benzenesulfonamide (GSK2126458); 8-(6-methoxypyridin-3-yl)-3-methyl-1-(4-(piperazin-1-yl)-3-(trifluoromethyl)phenyl)-1H-imidazo[4,5-c]quinolin-2 (3H)-one Maleic acid (NVP-BGT226); 3-[4-(4-Morpholinylpyrido[3′,2′: 4,5] furo [3,2-d]pyrimidin-2-yl]phenol (PI-103); 5-(9-isopropyl-8-methyl-2-morpholino-9H-purin-6-yl)pyrimidin-2-amine (VS-5584, SB2343); and N-[2-[(3,5-Dimethoxyphenyl)amino] quinoxalin-3-yl]-4-[(4-methyl-3-methoxyphenyl) carbonyl]aminophenylsulfonamide (XL765).

[1047] In embodiments, an anti-target CAR-expressing cell described herein is administered to a subject in combination with an anaplastic lymphoma kinase (ALK) inhibitor. Exemplary ALK kinases include but are not limited to crizotinib (Pfizer), ceritinib (Novartis), alectinib (Chugai), brigatinib (also called AP26113; Ariad), entrectinib (Ignyta), PF-06463922 (Pfizer), TSR-011 (Tesaro) (see, e.g., Clinical Trial Identifier No. NCT02048488), CEP-37440 (Teva), and X-396 (Xcovery). In some embodiments, the subject has a solid cancer, e.g., a solid cancer described herein, e.g., lung cancer.

[1048] The chemical name of crizotinib is 3-[(1R)-1-(2,6-dichloro-3-fluorophenyl) ethoxy]-5-(1-piperidin-4-y]pyrazol-4-yl) pyridin-2-amine. The chemical name of ceritinib is 5-Chloro-N2-[2-isopropoxy-5-methyl-4-(4-piperidinyl)phenyl]-N4-[2-(isopropylsulfonyl)phenyl]-2,4-pyrimidinediamine. The chemical name of alectinib is 9-ethyl-6,6-dimethyl-8-(4-morpholinopiperidin-1-yl)-11-oxo-6,11-dihydro-5H-benzo[b] carbazole-3-carbonitrile. The chemical name of brigatinib is 5-Chloro-N2-{4-[4-(dimethylamino)-1-piperidinyl]-2-methoxyphenyl}-N4-[2-(dimethylphosphoryl)phenyl]-2,4-pyrimidinediamine. The chemical name of entrectinib is N-(5-(3,5-difluorobenzyl)-1H-indazol-3-yl)-4-(4-methylpiperazin-1-yl)-2-((tetrahydro-2H-pyran-4-yl)amino)benzamide. The chemical name of PF-06463922 is (10R)-7-Amino-12-fluoro-2,10,16-trimethyl-15-oxo-10,15,16,17-tetrahydro-2H-8,4-(metheno) pyrazolo[4,3-h][2,5,11]-benzoxadiazacyclotetradecine-3-carbonitrile. The chemical structure of CEP-37440 is(S)-2-((5-chloro-2-((6-(4-(2-hydroxyethyl) piperazin-1-yl)-1-methoxy-6,7,8,9-tetrahydro-5H-benzo[7]annulen-2-yl)amino) pyrimidin-4-yl)amino)-N-methylbenzamide. The chemical name of X-396 is (R)-6-amino-5-(1-(2,6-dichloro-3-fluorophenyl) ethoxy)-N-(4-(4-methylpiperazine-1-carbonyl)phenyl)pyridazine-3-carboxamide.

[1049] Drugs that inhibit either the calcium dependent phosphatase calcineurin (cyclosporine and FK506) or inhibit the p70S6 kinase that is important for growth factor induced signaling (rapamycin). (Liu et al., Cell 66:807-815, 1991; Henderson et al., Immun. 73:316-321, 1991; Bierer et al., Curr. Opin. Immun. 5:763-773, 1993) can also be used. In a further aspect, the cell compositions of the present invention may be administered to a patient in conjunction with (e.g., before, simultaneously or following) bone marrow transplantation, T cell ablative therapy using chemotherapy agents such as, fludarabine, external-beam radiation therapy (XRT), cyclophosphamide, and/or antibodies such as OKT3 or CAMPATH. In one aspect, the cell compositions of the present invention are administered following B-cell ablative therapy such as agents that react with CD20, e.g., Rituxan. For example, in one embodiment, subjects may undergo standard treatment with high dose chemotherapy followed by peripheral blood stem cell transplantation. In certain embodiments, following the transplant, subjects receive an infusion of the expanded immune cells of the present invention. In an additional embodiment, expanded cells are administered before or following surgery.

[1050] In embodiments, an anti-target CAR-expressing cell described herein is administered to a subject in combination with an indoleamine 2,3-dioxygenase (IDO) inhibitor. IDO is an enzyme that catalyzes the degradation of the amino acid, L-tryptophan, to kynurenine. Many cancers overexpress IDO, e.g., prostatic, colorectal, pancreatic, cervical, gastric, ovarian, head, and lung cancer. pDCs, macrophages, and dendritic cells (DCs) can express IDO. Without being bound by theory, it is thought that a decrease in L-tryptophan (e.g., catalyzed by IDO) results in an immunosuppressive milieu by inducing T-cell anergy and apoptosis. Thus, without being bound by theory, it is thought that an IDO inhibitor can enhance the efficacy of an anti-target CAR-expressing cell described herein, e.g., by decreasing the suppression or death of an anti-target CAR-expressing immune cell. In embodiments, the subject has a solid tumor, e.g., a solid tumor described herein, e.g., prostatic, colorectal, pancreatic, cervical, gastric, ovarian, head, or lung cancer. Exemplary inhibitors of IDO include but are not limited to 1-methyl-tryptophan, indoximod (NewLink Genetics) (see, e.g., Clinical Trial Identifier Nos. NCT01191216; NCT01792050), and INCB024360 (Incyte Corp.) (see, e.g., Clinical Trial Identifier Nos. NCT01604889; NCT01685255).

[1051] In embodiments, an anti-target CAR-expressing cell described herein is administered to a subject in combination with a modulator of myeloid-derived suppressor cells (MDSCs). MDSCs accumulate in the periphery and at the tumor site of many solid tumors. These cells suppress T cell responses, thereby hindering the efficacy of anti-target CAR-expressing cell therapy. Without being bound by theory, it is thought that administration of a MDSC modulator enhances the efficacy of an anti-target CAR-expressing cell described herein. In an embodiment, the subject has a solid tumor, e.g., a solid tumor described herein, e.g., glioblastoma. Exemplary modulators of MDSCs include but are not limited to MCS110 and BLZ945. MCS110 is a monoclonal antibody (mAb) against macrophage colony-stimulating factor (M-CSF). See, e.g., Clinical Trial Identifier No. NCT00757757. BLZ945 is a small molecule inhibitor of colony stimulating factor 1 receptor (CSF1R). See, e.g., Pyonteck et al. Nat. Med. 19 (2013): 1264-72. The structure of BLZ945 is shown below.

[chemical structure]

[1052] In some embodiments, an anti-target CAR-expressing cell described herein is administered to a subject in combination with a interleukin-15 (IL-15) polypeptide, a interleukin-15 receptor alpha (IL-15Ra) polypeptide, or a combination of both a IL-15 polypeptide and a IL-15Ra polypeptide e.g., hetIL-15 (Admune Therapeutics, LLC). hetIL-15 is a heterodimeric non-covalent complex of IL-15 and IL-15Ra. hetIL-15 is described in, e.g., U.S. Pat. No. 8,124,084, U.S. 2012/0177598, U.S. 2009/0082299, U.S. 2012/0141413, and U.S. 2011/0081311, incorporated herein by reference. In embodiments, het-IL-15 is administered subcutaneously. In embodiments, the subject has a cancer, e.g., solid cancer, e.g., melanoma or colon cancer. In embodiments, the subject has a metastatic cancer.

[1053] In one embodiment, the subject can be administered an agent which reduces or ameliorates a side effect associated with the administration of an anti-target CAR-expressing cell. Side effects associated with the administration of an anti-target CAR-expressing cell include, but are not limited to CRS, and hemophagocytic lymphohistiocytosis (HLH), also termed Macrophage Activation Syndrome (MAS). Symptoms of CRS include high fevers, nausea, transient hypotension, hypoxia, and the like. CRS may include clinical constitutional signs and symptoms such as fever, fatigue, anorexia, myalgias, arthalgias, nausea, vomiting, and headache. CRS may include clinical skin signs and symptoms such as rash. CRS may include clinical gastrointestinal signs and symptoms such as nausea, vomiting and diarrhea. CRS may include clinical respiratory signs and symptoms such as tachypnea and hypoxemia. CRS may include clinical cardiovascular signs and symptoms such as tachycardia, widened pulse pressure, hypotension, increased cardiac output (early) and potentially diminished cardiac output (late). CRS may include clinical coagulation signs and symptoms such as elevated d-dimer, hypofibrinogenemia with or without bleeding. CRS may include clinical renal signs and symptoms such as azotemia. CRS may include clinical hepatic signs and symptoms such as transaminitis and hyperbilirubinemia. CRS may include clinical neurologic signs and symptoms such as headache, mental status changes, confusion, delirium, word finding difficulty or frank aphasia, hallucinations, tremor, dymetria, altered gait, and seizures.

[1054] Accordingly, the methods described herein can comprise administering an anti-target CAR-expressing cell described herein to a subject and further administering one or more agents to manage elevated levels of a soluble factor resulting from treatment with a anti-target CAR-expressing cell. In one embodiment, the soluble factor elevated in the subject is one or more of IFN-γ, TNFα, IL-2 and IL-6. In an embodiment, the factor elevated in the subject is one or more of IL-1, GM-CSF, IL-10, IL-8, IL-5 and fraktalkine. Therefore, an agent administered to treat this side effect can be an agent that neutralizes one or more of these soluble factors. In one embodiment, the agent that neutralizes one or more of these soluble forms is an antibody or antigen binding fragment thereof. Examples of such agents include, but are not limited to a steroid (e.g., corticosteroid), an inhibitor of TNFα, and an inhibitor of IL-6. An example of a TNFα inhibitor is an anti-TNFα antibody molecule such as, infliximab, adalimumab, certolizumab pegol, and golimumab. Another example of a TNFα inhibitor is a fusion protein such as entanercept. Small molecule inhibitors of TNFα include, but are not limited to, xanthine derivatives (e.g. pentoxifylline) and bupropion. An example of an IL-6 inhibitor is an anti-IL-6 antibody molecule or an anti-IL-6 receptor antibody molecule such as tocilizumab (toc), sarilumab, elsilimomab, CNTO 328, ALD518/BMS-945429, CNTO 136, CPSI-2364, CDP6038, VX30, ARGX-109, FE301, and FM101. In one embodiment, the anti-IL-6 receptor antibody molecule is tocilizumab. An example of an IL-1R based inhibitor is anakinra.

[1055] In one embodiment, the subject can be administered an agent which enhances the activity of a anti-target CAR-expressing cell. For example, in one embodiment, the agent can be an agent which inhibits an inhibitory molecule. Inhibitory molecules, e.g., Programmed Death 1 (PD-1), can, in some embodiments, decrease the ability of a anti-target CAR-expressing cell to mount an immune effector response. Examples of inhibitory molecules include PD-1, PD-L1, CTLA-4, TIM-3, CEACAM (e.g., CEACAM-1, CEACAM-3 and/or CEACAM-5), LAG-3, VISTA, BTLA, TIGIT, LAIR1, CD160, 2B4 and TGF beta. Inhibition of an inhibitory molecule, e.g., by inhibition at the DNA, RNA or protein level, can optimize a anti-target CAR-expressing cell performance. In embodiments, an inhibitory nucleic acid, e.g., an inhibitory nucleic acid, e.g., a dsRNA, e.g., an siRNA or shRNA, a clustered regularly interspaced short palindromic repeats (CRISPR), a transcription-activator like effector nuclease (TALEN), or a zinc finger endonuclease (ZFN), e.g., as described herein, can be used to inhibit expression of an inhibitory molecule in the anti-target CAR-expressing cell. In an embodiment the inhibitor is an shRNA. In an embodiment, the inhibitory molecule is inhibited within a anti-target CAR-expressing cell. In these embodiments, a dsRNA molecule that inhibits expression of the inhibitory molecule is linked to the nucleic acid that encodes a component, e.g., all of the components, of the anti-target CAR. In one embodiment, the inhibitor of an inhibitory signal can be, e.g., an antibody or antibody fragment that binds to an inhibitory molecule. For example, the agent can be an antibody or antibody fragment that binds to PD-1, PD-L1, PD-L2 or CTLA4 (e.g., ipilimumab (also referred to as MDX-010 and MDX-101, and marketed as Yervoy®; Bristol-Myers Squibb; Tremelimumab (IgG2 monoclonal antibody available from Pfizer, formerly known as ticilimumab, CP-675,206)). In an embodiment, the agent is an antibody or antibody fragment that binds to TIM3. In an embodiment, the agent is an antibody or antibody fragment that binds to CEACAM (CEACAM-1, CEACAM-3, and/or CEACAM-5). In an embodiment, the agent is an antibody or antibody fragment that binds to LAG3.

[1056] PD-1 is an inhibitory member of the CD28 family of receptors that also includes CD28, CTLA-4, ICOS, and BTLA. PD-1 is expressed on activated B cells, T cells and myeloid cells (Agata et al. 1996 Int. Immunol 8:765-75). Two ligands for PD-1, PD-L1 and PD-L2 have been shown to downregulate T cell activation upon binding to PD-1 (Freeman et a. 2000 J Exp Med 192:1027-34; Latchman et al. 2001 Nat Immunol 2:261-8; Carter et al. 2002 Eur J Immunol 32:634-43). PD-L1 is abundant in human cancers (Dong et al. 2003 J Mol Med 81:281-7; Blank et al. 2005 Cancer Immunol. Immunother 54:307-314; Konishi et al. 2004 Clin Cancer Res 10:5094). Immune suppression can be reversed by inhibiting the local interaction of PD-1 with PD-L1. Antibodies, antibody fragments, and other inhibitors of PD-1, PD-L1 and PD-L2 are available in the art and may be used combination with a cars of the present invention described herein. For example, nivolumab (also referred to as BMS-936558 or MDX1106; Bristol-Myers Squibb) is a fully human IgG4 monoclonal antibody which specifically blocks PD-1. Nivolumab (clone 5C4) and other human monoclonal antibodies that specifically bind to PD-1 are disclosed in U.S. Pat. No. 8,008,449 and WO2006/121168. Pidilizumab (CT-011; Cure Tech) is a humanized IgGlk monoclonal antibody that binds to PD-1. Pidilizumab and other humanized anti-PD-1 monoclonal antibodies are disclosed in WO2009/101611. Pembrolizumab (formerly known as lambrolizumab, and also referred to as MK03475; Merck) is a humanized IgG4 monoclonal antibody that binds to PD-1. Pembrolizumab and other humanized anti-PD-1 antibodies are disclosed in U.S. Pat. No. 8,354,509 and WO2009/114335. MEDI4736 (Medimmune) is a human monoclonal antibody that binds to PDL1, and inhibits interaction of the ligand with PD1. MDPL3280A (Genentech/Roche) is a human Fc optimized IgG1 monoclonal antibody that binds to PD-L1. MDPL3280A and other human monoclonal antibodies to PD-L1 are disclosed in U.S. Pat. No. 7,943,743 and U.S Publication No.: 20120039906. Other anti-PD-L1 binding agents include YW243.55.S70 (heavy and light chain variable regions are shown in SEQ ID NOs 20 and 21 in WO2010/077634) and MDX-1 105 (also referred to as BMS-936559, and, e.g., anti-PD-L1 binding agents disclosed in WO2007/005874). AMP-224 (B7-DCIg; Amplimmune; e.g., disclosed in WO2010/027827 and WO2011/066342), is a PD-L2 Fc fusion soluble receptor that blocks the interaction between PD-1 and B7-H1. Other anti-PD-1 antibodies include AMP 514 (Amplimmune), among others, e.g., anti-PD-1 antibodies disclosed in U.S. Pat. No. 8,609,089, US2010028330, and/or US20120114649.

[1057] TIM-3 (T cell immunoglobulin-3) also negatively regulates T cell function, particularly in IFN-g-secreting CD4+ T helper 1 and CD8+ T cytotoxic 1 cells, and plays a critical role in T cell exhaustion. Inhibition of the interaction between TIM3 and its ligands, e.g., galectin-9 (Gal9), phosphotidylserine (PS), and HMGB1, can increase immune response. Antibodies, antibody fragments, and other inhibitors of TIM3 and its ligands are available in the art and may be used combination with a CD19 CAR described herein. For example, antibodies, antibody fragments, small molecules, or peptide inhibitors that target TIM3 binds to the IgV domain of TIM3 to inhibit interaction with its ligands. Antibodies and peptides that inhibit TIM3 are disclosed in WO2013/006490 and US20100247521. Other anti-TIM3 antibodies include humanized versions of RMT3-23 (disclosed in Ngiow et al., 2011, Cancer Res, 71:3540-3551), and clone 8B.2C12 (disclosed in Monney et al., 2002, Nature, 415:536-541). Bi-specific antibodies that inhibit TIM3 and PD-1 are disclosed in US20130156774.

[1058] In other embodiments, the agent that enhances the activity of a anti-target CAR-expressing cell is a CEACAM inhibitor (e.g., CEACAM-1, CEACAM-3, and/or CEACAM-5 inhibitor). In one embodiment, the inhibitor of CEACAM is an anti-CEACAM antibody molecule. Exemplary anti-CEACAM-1 antibodies are described in WO 2010/125571, WO 2013/082366 WO 2014/059251 and WO 2014/022332, e.g., a monoclonal antibody 34B1, 26H7, and 5F4; or a recombinant form thereof, as described in, e.g., US 2004/0047858, U.S. Pat. No. 7,132,255 and WO 99/052552. In other embodiments, the anti-CEACAM antibody binds to CEACAM-5 as described in, e.g., Zheng et al. PLOS One. 2010 Sep. 2; 5 (9). pii: e12529 (DOI: 10:1371/journal.pone.0021146), or crossreacts with CEACAM-1 and CEACAM-5 as described in, e.g., WO 2013/054331 and US 2014/0271618.

[1059] Without wishing to be bound by theory, carcinoembryonic antigen cell adhesion molecules (CEACAM), such as CEACAM-1 and CEACAM-5, are believed to mediate, at least in part, inhibition of an anti-tumor immune response (see e.g., Markel et al. J Immunol. 2002 Mar. 15; 168 (6): 2803-10; Markel et al. J Immunol. 2006 Nov. 1; 177 (9): 6062-71; Markel et al. Immunology. 2009 February; 126 (2): 186-200; Markel et al. Cancer Immunol Immunother. 2010 February; 59 (2): 215-30; Ortenberg et al. Mol Cancer Ther. 2012 June; 11 (6): 1300-10; Stern et al. J Immunol. 2005 Jun. 1; 174 (11): 6692-701; Zheng et al. PLOS One. 2010 Sep. 2; 5 (9). pii: e12529). For example, CEACAM-1 has been described as a heterophilic ligand for TIM-3 and as playing a role in TIM-3-mediated T cell tolerance and exhaustion (see e.g., WO 2014/022332; Huang, et al. (2014) Nature doi: 10.1038/nature13848). In embodiments, co-blockade of CEACAM-1 and TIM-3 has been shown to enhance an anti-tumor immune response in xenograft colorectal cancer models (see e.g., WO 2014/022332; Huang, et al. (2014), supra). In other embodiments, co-blockade of CEACAM-1 and PD-1 reduce T cell tolerance as described, e.g., in WO 2014/059251. Thus, CEACAM inhibitors can be used with the other immunomodulators described herein (e.g., anti-PD-1 and/or anti-TIM-3 inhibitors) to enhance an immune response against a cancer, e.g., a melanoma, a lung cancer (e.g., NSCLC), a bladder cancer, a colon cancer an ovarian cancer, and other cancers as described herein.

[1060] LAG-3 (lymphocyte activation gene-3 or CD223) is a cell surface molecule expressed on activated T cells and B cells that has been shown to play a role in CD8+ T cell exhaustion. Antibodies, antibody fragments, and other inhibitors of LAG-3 and its ligands are available in the art and may be used combination with a anti-target CAR described herein. For example, BMS-986016 (Bristol-Myers Squib) is a monoclonal antibody that targets LAG3. IMP701 (Immutep) is an antagonist LAG-3 antibody and IMP731 (Immutep and GlaxoSmithKline) is a depleting LAG-3 antibody. Other LAG-3 inhibitors include IMP321 (Immutep), which is a recombinant fusion protein of a soluble portion of LAG3 and Ig that binds to MHC class II molecules and activates antigen presenting cells (APC). Other antibodies are disclosed, e.g., in WO2010/019570.

[1061] In some embodiments, the agent which enhances the activity of a anti-target CAR-expressing cell can be, e.g., a fusion protein comprising a first domain and a second domain, wherein the first domain is an inhibitory molecule, or fragment thereof, and the second domain is a polypeptide that is associated with a positive signal, e.g., a polypeptide comprising an intracellular signaling domain as described herein. In some embodiments, the polypeptide that is associated with a positive signal can include a costimulatory domain of CD28, CD27, ICOS, e.g., an intracellular signaling domain of CD28, CD27 and/or ICOS, and/or a primary signaling domain, e.g., of CD3 zeta, e.g., described herein. In one embodiment, the fusion protein is expressed by the same cell that expressed the anti-target CAR. In another embodiment, the fusion protein is expressed by a cell, e.g., a T cell that does not express a CAR of the present invention.

[1062] In one embodiment, the agent which enhances activity of a anti-target CAR-expressing cell described herein is miR-17-92.

[1063] In one embodiment, the agent which enhances activity of a anti-target CAR-described herein is a cytokine. Cytokines have important functions related to T cell expansion, differentiation, survival, and homeostasis. Cytokines that can be administered to the subject receiving a anti-target CAR-expressing cell described herein include: IL-2, IL-4, IL-7, IL-9, IL-15, IL-18, and IL-21, or a combination thereof. In preferred embodiments, the cytokine administered is IL-7, IL-15, or IL-21, or a combination thereof. The cytokine can be administered once a day or more than once a day, e.g., twice a day, three times a day, or four times a day. The cytokine can be administered for more than one day, e.g. the cytokine is administered for 2 days, 3 days, 4 days, 5 days, 6 days, 1 week, 2 weeks, 3 weeks, or 4 weeks. For example, the cytokine is administered once a day for 7 days.

[1064] In embodiments, the cytokine is administered in combination with anti-target CAR-expressing T cells. The cytokine can be administered simultaneously or concurrently with the anti-target CAR-expressing T cells, e.g., administered on the same day. The cytokine may be prepared in the same pharmaceutical composition as the anti-target CAR-expressing T cells, or may be prepared in a separate pharmaceutical composition. Alternatively, the cytokine can be administered shortly after administration of the anti-target CAR-expressing T cells, e.g., 1 day, 2 days, 3 days, 4 days, 5 days, 6 days, or 7 days after administration of the anti-target CAR-expressing T cells. In embodiments where the cytokine is administered in a dosing regimen that occurs over more than one day, the first day of the cytokine dosing regimen can be on the same day as administration with the anti-target CAR-expressing T cells, or the first day of the cytokine dosing regimen can be 1 day, 2 days, 3 days, 4 days, 5 days, 6 days, or 7 days after administration of the anti-target CAR-expressing T cells. In one embodiment, on the first day, the anti-target CAR-expressing T cells are administered to the subject, and on the second day, a cytokine is administered once a day for the next 7 days. In a preferred embodiment, the cytokine to be administered in combination with anti-target CAR-expressing T cells is IL-7, IL-15, or IL-21.

[1065] In other embodiments, the cytokine is administered a period of time after administration of anti-target CAR-expressing cells, e.g., at least 2 weeks, 3 weeks, 4 weeks, 6 weeks, 8 weeks, 10 weeks, 12 weeks, 4 months, 5 months, 6 months, 7 months, 8 months, 9 months, 10 months, 11 months, or 1 year or more after administration of anti-target CAR-expressing cells. In one embodiment, the cytokine is administered after assessment of the subject's response to the anti-target CAR-expressing cells. For example, the subject is administered anti-target CAR-expressing cells according to the dosage and regimens described herein. The response of the subject to anti-target CAR-expressing cell therapy is assessed at 2 weeks, 3 weeks, 4 weeks, 6 weeks, 8 weeks, 10 weeks, 12 weeks, 4 months, 5 months, 6 months, 7 months, 8 months, 9 months, 10 months, 11 months, or 1 year or more after administration of anti-target CAR-expressing cells, using any of the methods described herein, including inhibition of tumor growth, reduction of circulating tumor cells, or tumor regression. Subjects that do not exhibit a sufficient response to anti-target CAR-expressing cell therapy can be administered a cytokine. Administration of the cytokine to the subject that has sub-optimal response to the anti-target CAR-expressing cell therapy improves anti-target CAR-expressing cell efficacy or anti-cancer activity. In a preferred embodiment, the cytokine administered after administration of anti-target CAR-expressing cells is IL-7.

Combination with a Low Dose of an mTOR Inhibitor

[1066] In one embodiment, the cells expressing a anti-target CAR molecule, e.g., a anti-target CAR molecule described herein, are administered in combination with a low, immune enhancing dose of an mTOR inhibitor.

[1067] In an embodiment, a dose of an mTOR inhibitor is associated with, or provides, mTOR inhibition of at least 5 but no more than 90%, at least 10 but no more than 90%, at least 15, but no more than 90%, at least 20 but no more than 90%, at least 30 but no more than 90%, at least 40 but no more than 90%, at least 50 but no more than 90%, at least 60 but no more than 90%, or at least 70 but no more than 90%.

[1068] In an embodiment, a dose of an mTOR inhibitor is associated with, or provides, mTOR inhibition of at least 5 but no more than 80%, at least 10 but no more than 80%, at least 15, but no more than 80%, at least 20 but no more than 80%, at least 30 but no more than 80%, at least 40 but no more than 80%, at least 50 but no more than 80%, or at least 60 but no more than 80%.

[1069] In an embodiment, a dose of an mTOR inhibitor is associated with, or provides, mTOR inhibition of at least 5 but no more than 70%, at least 10 but no more than 70%, at least 15, but no more than 70%, at least 20 but no more than 70%, at least 30 but no more than 70%, at least 40 but no more than 70%, or at least 50 but no more than 70%.

[1070] In an embodiment, a dose of an mTOR inhibitor is associated with, or provides, mTOR inhibition of at least 5 but no more than 60%, at least 10 but no more than 60%, at least 15, but no more than 60%, at least 20 but no more than 60%, at least 30 but no more than 60%, or at least 40 but no more than 60%.

[1071] In an embodiment, a dose of an mTOR inhibitor is associated with, or provides, mTOR inhibition of at least 5 but no more than 50%, at least 10 but no more than 50%, at least 15, but no more than 50%, at least 20 but no more than 50%, at least 30 but no more than 50%, or at least 40 but no more than 50%.

[1072] In an embodiment, a dose of an mTOR inhibitor is associated with, or provides, mTOR inhibition of at least 5 but no more than 40%, at least 10 but no more than 40%, at least 15, but no more than 40%, at least 20 but no more than 40%, at least 30 but no more than 40%, or at least 35 but no more than 40%.

[1073] In an embodiment, a dose of an mTOR inhibitor is associated with, or provides, mTOR inhibition of at least 5 but no more than 30%, at least 10 but no more than 30%, at least 15, but no more than 30%, at least 20 but no more than 30%, or at least 25 but no more than 30%.

[1074] In an embodiment, a dose of an mTOR inhibitor is associated with, or provides, mTOR inhibition of at least 1, 2, 3, 4 or 5 but no more than 20%, at least 1, 2, 3, 4 or 5 but no more than 30%, at least 1, 2, 3, 4 or 5, but no more than 35, at least 1, 2, 3, 4 or 5 but no more than 40%, or at least 1, 2, 3, 4 or 5 but no more than 45%.

[1075] In an embodiment, a dose of an mTOR inhibitor is associated with, or provides, mTOR inhibition of at least 1, 2, 3, 4 or 5 but no more than 90%.

[1076] As is discussed herein, the extent of mTOR inhibition can be expressed as the extent of P70 S6 kinase inhibition, e.g., the extent of mTOR inhibition can be determined by the level of decrease in P70 S6 kinase activity, e.g., by the decrease in phosphorylation of a P70 S6 kinase substrate. The level of mTOR inhibition can be evaluated by a method described herein, e.g. by the Boulay assay, or measurement of phosphorylated S6 levels by western blot.

Exemplary mTOR Inhibitors

[1077] As used herein, the term “mTOR inhibitor” refers to a compound or ligand, or a pharmaceutically acceptable salt thereof, which inhibits the mTOR kinase in a cell. In an embodiment an mTOR inhibitor is an allosteric inhibitor. In an embodiment an mTOR inhibitor is a catalytic inhibitor.

[1078] Allosteric mTOR inhibitors include the neutral tricyclic compound rapamycin (sirolimus), rapamycin-related compounds, that is compounds having structural and functional similarity to rapamycin including, e.g., rapamycin derivatives, rapamycin analogs (also referred to as rapalogs) and other macrolide compounds that inhibit mTOR activity.

[1079] Rapamycin is a known macrolide antibiotic produced by Streptomyces hygroscopicus having the structure shown in Formula A.

[chemical structure]

[1080] See, e.g., McAlpine, J. B., et al., J. Antibiotics (1991) 44:688; Schreiber, S. L., et al., J. Am. Chem. Soc. (1991) 113:7433; U.S. Pat. No. 3,929,992. There are various numbering schemes proposed for rapamycin. To avoid confusion, when specific rapamycin analogs are named herein, the names are given with reference to rapamycin using the numbering scheme of formula A.

[1081] Rapamycin analogs useful in the invention are, for example, O-substituted analogs in which the hydroxyl group on the cyclohexyl ring of rapamycin is replaced by OR1 in which R1 is hydroxyalkyl, hydroxyalkoxyalkyl, acylaminoalkyl, or aminoalkyl; e.g. RAD001, also known as, everolimus as described in U.S. Pat. No. 5,665,772 and WO94/09010 the contents of which are incorporated by reference. Other suitable rapamycin analogs include those substituted at the 26- or 28-position. The rapamycin analog may be an epimer of an analog mentioned above, particularly an epimer of an analog substituted in position 40, 28 or 26, and may optionally be further hydrogenated, e.g. as described in U.S. Pat. No. 6,015,815, WO95/14023 and WO99/15530 the contents of which are incorporated by reference, e.g. ABT578 also known as zotarolimus or a rapamycin analog described in U.S. Pat. No. 7,091,213, WO98/02441 and WO01/14387 the contents of which are incorporated by reference, e.g. AP23573 also known as ridaforolimus.

[1082] Examples of rapamycin analogs suitable for use in the present invention from U.S. Pat. No. 5,665,772 include, but are not limited to, 40-O-benzyl-rapamycin, 40-O-(4′-hydroxymethyl)benzyl-rapamycin, 40-O-[4′-(1,2-dihydroxyethyl)] benzyl-rapamycin, 40-O-allyl-rapamycin, 40-O-[3′-(2,2-dimethyl-1,3-dioxolan-4 (S)-yl)-prop-2′-en-1′-yl]-rapamycin, (2′E,4'S)-40-O-(4′,5′-dihydroxypent-2′-en-1′-yl)-rapamycin, 40-O-(2-hydroxy) ethoxycarbonylmethyl-rapamycin, 40-O-(2-hydroxy)ethyl-rapamycin, 40-O-(3-hydroxy) propyl-rapamycin, 40-O-(6-hydroxy) hexyl-rapamycin, 40-O-[2-(2-hydroxy) ethoxy]ethyl-rapamycin, 40-O-[(3S)-2,2-dimethyldioxolan-3-yl]methyl-rapamycin, 40-O-[(2S)-2,3-dihydroxyprop-1-yl]-rapamycin, 40-O-(2-acetoxy)ethyl-rapamycin, 40-O-(2-nicotinoyloxy)ethyl-rapamycin, 40-O-[2-(N-morpholino) acetoxy] ethyl-rapamycin, 40-O-(2-N-imidazolylacetoxy)ethyl-rapamycin, 40-O-[2-(N-methyl-N′-piperazinyl) acetoxy] ethyl-rapamycin, 39-O-desmethyl-39,40-O,O-ethylene-rapamycin, (26R)-26-dihydro-40-O-(2-hydroxy)ethyl-rapamycin, 40-O-(2-aminoethyl)-rapamycin, 40-O-(2-acetaminoethyl)-rapamycin, 40-O-(2-nicotinamidoethyl)-rapamycin, 40-O-(2-(N-methyl-imidazo-2′-ylcarbethoxamido)ethyl)-rapamycin, 40-O-(2-ethoxycarbonylaminoethyl)-rapamycin, 40-O-(2-tolylsulfonamidoethyl)-rapamycin and 40-O-[2-(4′,5′-dicarboethoxy-1′,2′,3′-triazol-1′-yl)-ethyl]-rapamycin.

[1083] Other rapamycin analogs useful in the present invention are analogs where the hydroxyl group on the cyclohexyl ring of rapamycin and/or the hydroxy group at the 28 position is replaced with an hydroxyester group are known, for example, rapamycin analogs found in U.S. RE44,768, e.g. temsirolimus.

[1084] Other rapamycin analogs useful in the preset invention include those wherein the methoxy group at the 16 position is replaced with another substituent, preferably (optionally hydroxy-substituted)alkynyloxy, benzyl, orthomethoxybenzyl or chlorobenzyl and/or wherein the mexthoxy group at the 39 position is deleted together with the 39 carbon so that the cyclohexyl ring of rapamycin becomes a cyclopentyl ring lacking the 39 position methyoxy group; e.g. as described in WO95/16691 and WO96/41807 the contents of which are incorporated by reference. The analogs can be further modified such that the hydroxy at the 40-position of rapamycin is alkylated and/or the 32-carbonyl is reduced.

[1085] Rapamycin analogs from WO95/16691 include, but are not limited to, 16-demthoxy-16-(pent-2-ynyl)oxy-rapamycin, 16-demthoxy-16-(but-2-ynyl)oxy-rapamycin, 16-demthoxy-16-(propargyl)oxy-rapamycin, 16-demethoxy-16-(4-hydroxy-but-2-ynyl)oxy-rapamycin, 16-demthoxy-16-benzyloxy-40-O-(2-hydroxyethyl)-rapamycin, 16-demthoxy-16-benzyloxy-rapamycin, 16-demethoxy-16-ortho-methoxybenzyl-rapamycin, 16-demethoxy-40-O-(2-methoxyethyl)-16-pent-2-ynyl)oxy-rapamycin, 39-demethoxy-40-desoxy-39-formyl-42-nor-rapamycin, 39-demethoxy-40-desoxy-39-hydroxymethyl-42-nor-rapamycin, 39-demethoxy-40-desoxy-39-carboxy-42-nor-rapamycin, 39-demethoxy-40-desoxy-39-(4-methyl-piperazin-1-yl) carbonyl-42-nor-rapamycin, 39-demethoxy-40-desoxy-39-(morpholin-4-yl) carbonyl-42-nor-rapamycin, 39-demethoxy-40-desoxy-39-[N-methyl, N-(2-pyridin-2-yl-ethyl)] carbamoyl-42-nor-rapamycin and 39-demethoxy-40-desoxy-39-(p-toluenesulfonylhydrazonomethyl)-42-nor-rapamycin.

[1086] Rapamycin analogs from WO96/41807 include, but are not limited to, 32-deoxo-rapamycin, 16-O-pent-2-ynyl-32-deoxo-rapamycin, 16-O-pent-2-ynyl-32-deoxo-40-O-(2-hydroxy-ethyl)-rapamycin, 16-O-pent-2-ynyl-32-(S)-dihydro-40-O-(2-hydroxyethyl)-rapamycin, 32 (S)-dihydro-40-O-(2-methoxy)ethyl-rapamycin and 32 (S)-dihydro-40-O-(2-hydroxyethyl)-rapamycin.

[1087] Another suitable rapamycin analog is umirolimus as described in US2005/0101624 the contents of which are incorporated by reference.

[1088] RAD001, otherwise known as everolimus (Afinitor®), has the chemical name (1R,9S,12S,15R,16E,18R,19R,21R,23S,24E,26E,28E,30S,32S,35R)-1,18-dihydroxy-12-{(1R)-2-[(1S,3R,4R)-4-(2-hydroxyethoxy)-3-methoxycyclohexyl]-1-methylethyl}-19,30-dimethoxy-15,17,21,23,29,35-hexamethyl-11,36-dioxa-4-aza-tricyclo[30.3.1.0^{4,9}]hexatriaconta-16,24,26,28-tetraene-2,3,10,14,20-pentaone

[1089] Further examples of allosteric mTOR inhibitors include sirolimus (rapamycin, AY-22989), 40-[3-hydroxy-2-(hydroxymethyl)-2-methylpropanoate]-rapamycin (also called temsirolimus or CCI-779) and ridaforolimus (AP-23573/MK-8669). Other examples of allosteric mTor inhibtors include zotarolimus (ABT578) and umirolimus.

[1090] Alternatively or additionally, catalytic, ATP-competitive mTOR inhibitors have been found to target the mTOR kinase domain directly and target both mTORC1 and mTORC2. These are also more effective inhibitors of mTORC1 than such allosteric mTOR inhibitors as rapamycin, because they modulate rapamycin-resistant mTORC1 outputs such as 4EBP1-T37/46 phosphorylation and cap-dependent translation.

[1091] Catalytic inhibitors include: BEZ235 or 2-methyl-2-[4-(3-methyl-2-oxo-8-quinolin-3-yl-2,3-dihydro-imidazo[4,5-c]quinolin-1-yl)-phenyl]-propionitrile, or the monotosylate salt form. the synthesis of BEZ235 is described in WO2006/122806; CCG168 (otherwise known as AZD-8055, Chresta, C. M., et al., Cancer Res, 2010, 70 (1), 288-298) which has the chemical name {5-[2,4-bis-((S)-3-methyl-morpholin-4-yl)-pyrido[2,3d]pyrimidin-7-yl]-2-methoxy-phenyl}-methanol; 3-[2,4-bis [(3S)-3-methylmorpholin-4-yl]pyrido[2,3-d]pyrimidin-7-yl]-N-methylbenzamide (WO09104019); 3-(2-aminobenzo[d]oxazol-5-yl)-1-isopropyl-1H-pyrazolo[3,4-d]pyrimidin-4-amine (WO10051043 and WO2013023184); A N-(3-(N-(3-((3,5-dimethoxyphenyl)amino) quinoxaline-2-yl) sulfamoyl)phenyl)-3-methoxy-4-methylbenzamide (WO07044729 and WO12006552); PKI-587 (Venkatesan, A.M., J. Med. Chem., 2010, 53, 2636-2645) which has the chemical name 1-[4-[4-(dimethylamino) piperidine-1-carbonyl]phenyl]-3-[4-(4,6-dimorpholino-1,3,5-triazin-2-yl)phenyl] urea; GSK-2126458 (ACS Med. Chem. Lett., 2010, 1, 39-43) which has the chemical name 2,4-difluoro-N-{2-methoxy-5-[4-(4-pyridazinyl)-6-quinolinyl]-3-pyridinyl}benzenesulfonamide; 5-(9-isopropyl-8-methyl-2-morpholino-9H-purin-6-yl)pyrimidin-2-amine (WO10114484); (E)-N-(8-(6-amino-5-(trifluoromethyl) pyridin-3-yl)-1-(6-(2-cyanopropan-2-yl) pyridin-3-yl)-3-methyl-1H-imidazo[4,5-c]quinolin-2 (3H)-ylidene) cyanamide (WO12007926).

[1092] Further examples of catalytic mTOR inhibitors include 8-(6-methoxy-pyridin-3-yl)-3-methyl-1-(4-piperazin-1-yl-3-trifluoromethyl-phenyl)-1,3-dihydro-imidazo[4,5-c]quinolin-2-one (WO2006/122806) and Ku-0063794 (Garcia-Martinez J M, et al., Biochem J., 2009, 421 (1), 29-42 . . . . Ku-0063794 is a specific inhibitor of the mammalian target of rapamycin (mTOR).) WYE-354 is another example of a catalytic mTor inhibitor (Yu K, et al. (2009). Biochemical, Cellular, and In vivo Activity of Novel ATP-Competitive and Selective Inhibitors of the Mammalian Target of Rapamycin. Cancer Res. 69 (15): 6232-6240).

[1093] mTOR inhibitors useful according to the present invention also include prodrugs, derivatives, pharmaceutically acceptable salts, or analogs thereof of any of the foregoing.

[1094] mTOR inhibitors, such as RAD001, may be formulated for delivery based on well-established methods in the art based on the particular dosages described herein. In particular, U.S. Pat. No. 6,004,973 (incorporated herein by reference) provides examples of formulations useable with the mTOR inhibitors described herein.

Evaluation of mTOR Inhibition

[1095] mTOR phosphorylates the kinase P70 S6, thereby activating P70 S6 kinase and allowing it to phosphorylate its substrate. The extent of mTOR inhibition can be expressed as the extent of P70 S6 kinase inhibition, e.g., the extent of mTOR inhibition can be determined by the level of decrease in P70 S6 kinase activity, e.g., by the decrease in phosphorylation of a P70 S6 kinase substrate. One can determine the level of mTOR inhibition, by measuring P70 S6 kinase activity (the ability of P70 S6 kinase to phosphorylate a substrate), in the absence of inhibitor, e.g., prior to administration of inhibitor, and in the presences of inhibitor, or after the administration of inhibitor. The level of inhibition of P70 S6 kinase gives the level of mTOR inhibition. Thus, if P70 S6 kinase is inhibited by 40%, mTOR activity, as measured by P70 S6 kinase activity, is inhibited by 40%. The extent or level of inhibition referred to herein is the average level of inhibition over the dosage interval. By way of example, if the inhibitor is given once per week, the level of inhibition is given by the average level of inhibition over that interval, namely a week.

[1096] Boulay et al., Cancer Res, 2004, 64:252-61, hereby incorporated by reference, teaches an assay that can be used to assess the level of mTOR inhibition (referred to herein as the Boulay assay). In an embodiment, the assay relies on the measurement of P70 S6 kinase activity from biological samples before and after administration of an mTOR inhibitor, e.g., RAD001. Samples can be taken at preselected times after treatment with an mTOR inhibitor, e.g., 24, 48, and 72 hours after treatment. Biological samples, e.g., from skin or peripheral blood mononuclear cells (PBMCs) can be used. Total protein extracts are prepared from the samples. P70 S6 kinase is isolated from the protein extracts by immunoprecipitation using an antibody that specifically recognizes the P70 S6 kinase. Activity of the isolated P70 S6 kinase can be measured in an in vitro kinase assay. The isolated kinase can be incubated with 40S ribosomal subunit substrates (which is an endogenous substrate of P70 S6 kinase) and gamma-32P under conditions that allow phosphorylation of the substrate. Then the reaction mixture can be resolved on an SDS-PAGE gel, and 32P signal analyzed using a PhosphorImager. A 32P signal corresponding to the size of the 40S ribosomal subunit indicates phosphorylated substrate and the activity of P70 S6 kinase. Increases and decreases in kinase activity can be calculated by quantifying the area and intensity of the 32P signal of the phosphorylated substrate (e.g., using ImageQuant, Molecular Dynamics), assigning arbitrary unit values to the quantified signal, and comparing the values from after administration with values from before administration or with a reference value. For example, percent inhibition of kinase activity can be calculated with the following formula: 1-(value obtained after administration/value obtained before administration)×100. As described above, the extent or level of inhibition referred to herein is the average level of inhibition over the dosage interval.

[1097] Methods for the evaluation of kinase activity, e.g., P70 S6 kinase activity, are also provided in U.S. Pat. No. 7,727,950, hereby incorporated by reference.

[1098] The level of mTOR inhibition can also be evaluated by a change in the ration of PD1 negative to PD1 positive T cells. T cells from peripheral blood can be identified as PD1 negative or positive by art-known methods.

Low-Dose mTOR Inhibitors

[1099] Methods described herein use low, immune enhancing, dose mTOR inhibitors, doses of mTOR inhibitors, e.g., allosteric mTOR inhibitors, including rapalogs such as RAD001. In contrast, levels of inhibitor that fully or near fully inhibit the mTOR pathway are immunosuppressive and are used, e.g., to prevent organ transplant rejection. In addition, high doses of rapalogs that fully inhibit mTOR also inhibit tumor cell growth and are used to treat a variety of cancers (See, e.g., Antineoplastic effects of mammalian target of rapamycine inhibitors. Salvadori M. World J Transplant. 2012 Oct. 24; 2 (5): 74-83; Current and Future Treatment Strategies for Patients with Advanced Hepatocellular Carcinoma: Role of mTOR Inhibition. Finn RS. Liver Cancer. 2012 November; 1 (3-4): 247-256; Emerging Signaling Pathways in Hepatocellular Carcinoma. Moeini A, Cornellà H, Villanueva A. Liver Cancer. 2012 September; 1 (2): 83-93; Targeted cancer therapy—Are the days of systemic chemotherapy numbered? Joo WD, Visintin I, Mor G. Maturitas. 2013 Sep. 20.; Role of natural and adaptive immunity in renal cell carcinoma response to VEGFR-TKIs and mTOR inhibitor. Santoni M, Berardi R, Amantini C, Burattini L, Santini D, Santoni G, Cascinu S. Int J Cancer. 2013 Oct. 2).

[1100] The present invention is based, at least in part, on the surprising finding that doses of mTOR inhibitors well below those used in current clinical settings had a superior effect in increasing an immune response in a subject and increasing the ratio of PD-1 negative T cells/PD-1 positive T cells. It was surprising that low doses of mTOR inhibitors, producing only partial inhibition of mTOR activity, were able to effectively improve immune responses in human subjects and increase the ratio of PD-1 negative T cells/PD-1 positive T cells.

[1101] Alternatively, or in addition, without wishing to be bound by any theory, it is believed that low, a low, immune enhancing, dose of an mTOR inhibitor can increase naive T cell numbers, e.g., at least transiently, e.g., as compared to a non-treated subject. Alternatively or additionally, again while not wishing to be bound by theory, it is believed that treatment with an mTOR inhibitor after a sufficient amount of time or sufficient dosing results in one or more of the following:
[1102] an increase in the expression of one or more of the following markers: CD62L^{high} CD127^{high}, CD27⁺, and BCL2, e.g., on memory T cells, e.g., memory T cell precursors;
[1103] a decrease in the expression of KLRG1, e.g., on memory T cells, e.g., memory T cell precursors; and
[1104] an increase in the number of memory T cell precursors, e.g., cells with any one or combination of the following characteristics: increased CD62L^{high}, increased CD127^{high}, increased CD27⁺, decreased KLRG1, and increased BCL2;
[1105] and wherein any of the changes described above occurs, e.g., at least transiently, e.g., as compared to a non-treated subject (Araki, K et al. (2009) Nature 460:108-112). Memory T cell precursors are memory T cells that are early in the differentiation program. For example, memory T cells have one or more of the following characteristics: increased CD62L^{high}, increased CD127^{high}, increased CD27⁺, decreased KLRG1, and/or increased BCL2.

[1106] In an embodiment, the invention relates to a composition, or dosage form, of an mTOR inhibitor, e.g., an allosteric mTOR inhibitor, e.g., a rapalog, rapamycin, or RAD001, or a catalytic mTOR inhibitor, which, when administered on a selected dosing regimen, e.g., once daily or once weekly, is associated with: a level of mTOR inhibition that is not associated with complete, or significant immune suppression, but is associated with enhancement of the immune response.

[1107] An mTOR inhibitor, e.g., an allosteric mTOR inhibitor, e.g., a rapalog, rapamycin, or RAD001, or a catalytic mTOR inhibitor, can be provided in a sustained release formulation. Any of the compositions or unit dosage forms described herein can be provided in a sustained release formulation. In some embodiments, a sustained release formulation will have lower bioavailability than an immediate release formulation. E.g., in embodiments, to attain a similar therapeutic effect of an immediate release formulation a sustained release formulation will have from about 2 to about 5, about 2.5 to about 3.5, or about 3 times the amount of inhibitor provided in the immediate release formulation.

[1108] In an embodiment, immediate release forms, e.g., of RAD001, typically used for one administration per week, having 0.1 to 20, 0.5 to 10, 2.5 to 7.5, 3 to 6, or about 5, mgs per unit dosage form, are provided. For once per week administrations, these immediate release formulations correspond to sustained release forms, having, respectively, 0.3 to 60, 1.5 to 30, 7.5 to 22.5, 9 to 18, or about 15 mgs of an mTOR inhibitor, e.g., an allosteric mTOR inhibitor, e.g., rapamycin or RAD001. In embodiments both forms are administered on a once/week basis.

[1109] In an embodiment, immediate release forms, e.g., of RAD001, typically used for one administration per day, having 0.005 to 1.5, 0.01 to 1.5, 0.1 to 1.5, 0.2 to 1.5, 0.3 to 1.5, 0.4 to 1.5, 0.5 to 1.5, 0.6 to 1.5, 0.7 to 1.5, 0.8 to 1.5, 1.0 to 1.5, 0.3 to 0.6, or about 0.5 mgs per unit dosage form, are provided. For once per day administrations, these immediate release forms correspond to sustained release forms, having, respectively, 0.015 to 4.5, 0.03 to 4.5, 0.3 to 4.5, 0.6 to 4.5, 0.9 to 4.5, 1.2 to 4.5, 1.5 to 4.5, 1.8 to 4.5, 2.1 to 4.5, 2.4 to 4.5, 3.0 to 4.5, 0.9 to 1.8, or about 1.5 mgs of an mTOR inhibitor, e.g., an allosteric mTOR inhibitor, e.g., rapamycin or RAD001. For once per week administrations, these immediate release forms correspond to sustained release forms, having, respectively, 0.1 to 30, 0.2 to 30, 2 to 30, 4 to 30, 6 to 30, 8 to 30, 10 to 30, 1.2 to 30, 14 to 30, 16 to 30, 20 to 30, 6 to 12, or about 10 mgs of an mTOR inhibitor, e.g., an allosteric mTOR inhibitor, e.g., rapamycin or RAD001.

[1110] In an embodiment, immediate release forms, e.g., of RAD001, typically used for one administration per day, having 0.01 to 1.0 mgs per unit dosage form, are provided. For once per day administrations, these immediate release forms correspond to sustained release forms, having, respectively, 0.03 to 3 mgs of an mTOR inhibitor, e.g., an allosteric mTOR inhibitor, e.g., rapamycin or RAD001.For once per week administrations, these immediate release forms correspond to sustained release forms, having, respectively, 0.2 to 20 mgs of an mTOR inhibitor, e.g., an allosteric mTOR inhibitor, e.g., rapamycin or RAD001.

[1111] In an embodiment, immediate release forms, e.g., of RAD001, typically used for one administration per week, having 0.5 to 5.0 mgs per unit dosage form, are provided. For once per week administrations, these immediate release forms correspond to sustained release forms, having, respectively, 1.5 to 15 mgs of an mTOR inhibitor, e.g., an allosteric mTOR inhibitor, e.g., rapamycin or RAD001.

[1112] As described above, one target of the mTOR pathway is the P70 S6 kinase. Thus, doses of mTOR inhibitors which are useful in the methods and compositions described herein are those which are sufficient to achieve no greater than 80% inhibition of P70 S6 kinase activity relative to the activity of the P70 S6 kinase in the absence of an mTOR inhibitor, e.g., as measured by an assay described herein, e.g., the Boulay assay. In a further aspect, the invention provides an amount of an mTOR inhibitor sufficient to achieve no greater than 38% inhibition of P70 S6 kinase activity relative to P70 S6 kinase activity in the absence of an mTOR inhibitor.

[1113] In one aspect the dose of mTOR inhibitor useful in the methods and compositions of the invention is sufficient to achieve, e.g., when administered to a human subject, 90+/−5% (i.e., 85-95%), 89+/−5%, 88+/−5%, 87+/−5%, 86+/−5%, 85+/−5%, 84+/−5%, 83+/−5%, 82+/−5%, 81+/−5%, 80+/−5%, 79+/−5%, 78+/−5%, 77+/−5%, 76+/−5%, 75+/−5%, 74+/−5%, 73+/−5%, 72+/−5%, 71+/−5%, 70+/−5%, 69+/−5%, 68+/−5%, 67+/−5%, 66+/−5%, 65+/−5%, 64+/−5%, 63+/−5%, 62+/−5%, 61+/−5%, 60+/−5%, 59+/−5%, 58+/−5%, 57+/−5%, 56+/−5%, 55+/−5%, 54+/−5%, 54+/−5%, 53+/−5%, 52+/−5%, 51+/−5%, 50+/−5%, 49+/−5%, 48+/−5%, 47+/−5%, 46+/−5%, 45+/−5%, 44+/−5%, 43+/−5%, 42+/−5%, 41+/−5%, 40+/−5%, 39+/−5%, 38+/−5%, 37+/−5%, 36+/−5%, 35+/−5%, 34+/−5%, 33+/−5%, 32+/−5%, 31+/−5%, 30+/−5%, 29+/−5%, 28+/−5%, 27+/−5%, 26+/−5%, 25+/−5%, 24+/−5%, 23+/−5%, 22+/−5%, 21+/−5%, 20+/−5%, 19+/−5%, 18+/−5%, 17+/−5%, 16+/−5%, 15+/−5%, 14+/−5%, 13+/−5%, 12+/−5%, 11+/−5%, or 10+/−5%, inhibition of P70 S6 kinase activity, e.g., as measured by an assay described herein, e.g., the Boulay assay.

[1114] P70 S6 kinase activity in a subject may be measured using methods known in the art, such as, for example, according to the methods described in U.S. Pat. No. 7,727,950, by immunoblot analysis of phosphoP70 S6K levels and/or phosphoP70 S6 levels or by in vitro kinase activity assays.

[1115] As used herein, the term “about” in reference to a dose of mTOR inhibitor refers to up to a +/−10% variability in the amount of mTOR inhibitor, but can include no variability around the stated dose.

[1116] In some embodiments, the invention provides methods comprising administering to a subject an mTOR inhibitor, e.g., an allosteric inhibitor, e.g., RAD001, at a dosage within a target trough level. In some embodiments, the trough level is significantly lower than trough levels associated with dosing regimens used in organ transplant and cancer patients. In an embodiment mTOR inhibitor, e.g., RAD001, or rapamycin, is administered to result in a trough level that is less than 1/2, 1/4, 1/10, or 1/20 of the trough level that results in immunosuppression or an anticancer effect. In an embodiment mTOR inhibitor, e.g., RAD001, or rapamycin, is administered to result in a trough level that is less than 1/2, 1/4, 1/10, or 1/20 of the trough level provided on the FDA approved packaging insert for use in immunosuppression or an anticancer indications.

[1117] In an embodiment a method disclosed herein comprises administering to a subject an mTOR inhibitor, e.g., an allosteric inhibitor, e.g., RAD001, at a dosage that provides a target trough level of 0.1 to 10 ng/ml, 0.1 to 5 ng/ml, 0.1 to 3 ng/ml, 0.1 to 2 ng/ml, or 0.1 to 1 ng/ml.

[1118] In an embodiment a method disclosed herein comprises administering to a subject an mTOR inhibitor, e.g., an allosteric inhibitor, e.g., RAD001, at a dosage that provides a target trough level of 0.2 to 10 ng/ml, 0.2 to 5 ng/ml, 0.2 to 3 ng/ml, 0.2 to 2 ng/ml, or 0.2 to 1 ng/ml.

[1119] In an embodiment a method disclosed herein comprises administering to a subject an mTOR inhibitor, e.g. an, allosteric inhibitor, e.g., RAD001, at a dosage that provides a target trough level of 0.3 to 10 ng/ml, 0.3 to 5 ng/ml, 0.3 to 3 ng/ml, 0.3 to 2 ng/ml, or 0.3 to 1 ng/ml.

[1120] In an embodiment a method disclosed herein comprises administering to a subject an mTOR inhibitor, e.g., an allosteric inhibitor, e.g., RAD001, at a dosage that provides a target trough level of 0.4 to 10 ng/ml, 0.4 to 5 ng/ml, 0.4 to 3 ng/ml, 0.4 to 2 ng/ml, or 0.4 to 1 ng/ml.

[1121] In an embodiment a method disclosed herein comprises administering to a subject an mTOR inhibitor, e.g., an allosteric inhibitor, e.g., RAD001, at a dosage that provides a target trough level of 0.5 to 10 ng/ml, 0.5 to 5 ng/ml, 0.5 to 3 ng/ml, 0.5 to 2 ng/ml, or 0.5 to 1 ng/ml.

[1122] In an embodiment a method disclosed herein comprises administering to a subject an mTOR inhibitor, e.g., an allosteric inhibitor, e.g., RAD001, at a dosage that provides a target trough level of 1 to 10 ng/ml, 1 to 5 ng/ml, 1 to 3 ng/ml, or 1 to 2 ng/ml.

[1123] As used herein, the term “trough level” refers to the concentration of a drug in plasma just before the next dose, or the minimum drug concentration between two doses.

[1124] In some embodiments, a target trough level of RAD001 is in a range of between about 0.1 and 4.9 ng/ml. In an embodiment, the target trough level is below 3 ng/ml, e.g., is between 0.3 or less and 3 ng/ml. In an embodiment, the target trough level is below 3 ng/ml, e.g., is between 0.3 or less and 1 ng/ml.

[1125] In a further aspect, the invention can utilize an mTOR inhibitor other than RAD001 in an amount that is associated with a target trough level that is bioequivalent to the specified target trough level for RAD001. In an embodiment, the target trough level for an mTOR inhibitor other than RAD001, is a level that gives the same level of mTOR inhibition (e.g., as measured by a method described herein, e.g., the inhibition of P70 S6) as does a trough level of RAD001 described herein.

Pharmaceutical Compositions: mTOR Inhibitors

[1126] In one aspect, the present invention relates to pharmaceutical compositions comprising an mTOR inhibitor, e.g., an mTOR inhibitor as described herein, formulated for use in combination with CAR cells described herein.

[1127] In some embodiments, the mTOR inhibitor is formulated for administration in combination with an additional, e.g., as described herein.

[1128] In general, compounds of the invention will be administered in therapeutically effective amounts as described above via any of the usual and acceptable modes known in the art, either singly or in combination with one or more therapeutic agents.

[1129] The pharmaceutical formulations may be prepared using conventional dissolution and mixing procedures. For example, the bulk drug substance (e.g., an mTOR inhibitor or stabilized form of the compound (e.g., complex with a cyclodextrin derivative or other known complexation agent) is dissolved in a suitable solvent in the presence of one or more of the excipients described herein. The mTOR inhibitor is typically formulated into pharmaceutical dosage forms to provide an easily controllable dosage of the drug and to give the patient an elegant and easily handleable product.

[1130] Compounds of the invention can be administered as pharmaceutical compositions by any conventional route, in particular enterally, e.g., orally, e.g., in the form of tablets or capsules, or parenterally, e.g., in the form of injectable solutions or suspensions, topically, e.g., in the form of lotions, gels, ointments or creams, or in a nasal or suppository form. Where an mTOR inhibitor is administered in combination with (either simultaneously with or separately from) another agent as described herein, in one aspect, both components can be administered by the same route (e.g., parenterally). Alternatively, another agent may be administered by a different route relative to the mTOR inhibitor. For example, an mTOR inhibitor may be administered orally and the other agent may be administered parenterally.

Sustained Release mTOR inhibitors, e.g., allosteric mTOR inhibitors or catalytic mTOR inhibitors, disclosed herein can be provided as pharmaceutical formulations in form of oral solid dosage forms comprising an mTOR inhibitor disclosed herein, e.g., rapamycin or RAD001, which satisfy product stability requirements and/or have favorable pharmacokinetic properties over the immediate release (IR) tablets, such as reduced average plasma peak concentrations, reduced inter- and intra-patient variability in the extent of drug absorption and in the plasma peak concentration, reduced Cₘₐₓ/Cₘᵢₙ ratio and/or reduced food effects. Provided pharmaceutical formulations may allow for more precise dose adjustment and/or reduce frequency of adverse events thus providing safer treatments for patients with an mTOR inhibitor disclosed herein, e.g., rapamycin or RAD001.

[1131] In some embodiments, the present disclosure provides stable extended release formulations of an mTOR inhibitor disclosed herein, e.g., rapamycin or RAD001, which are multi-particulate systems and may have functional layers and coatings.

[1132] The term “extended release, multi-particulate formulation as used herein refers to a formulation which enables release of an mTOR inhibitor disclosed herein, e.g., rapamycin or RAD001, over an extended period of time e.g. over at least 1, 2, 3, 4, 5 or 6 hours. The extended release formulation may contain matrices and coatings made of special excipients, e.g., as described herein, which are formulated in a manner as to make the active ingredient available over an extended period of time following ingestion.

[1133] The term “extended release” can be interchangeably used with the terms “sustained release” (SR) or “prolonged release”. The term “extended release” relates to a pharmaceutical formulation that does not release active drug substance immediately after oral dosing but over an extended in accordance with the definition in the pharmacopoeias Ph. Eur. (7th edition) mongraph for tablets and capsules and USP general chapter <1151>for pharmaceutical dosage forms. The term “Immediate Release” (IR) as used herein refers to a pharmaceutical formulation which releases 85% of the active drug substance within less than 60 minutes in accordance with the definition of “Guidance for Industry: “Dissolution Testing of Immediate Release Solid Oral Dosage Forms” (FDA CDER, 1997). In some embodiments, the term “immediate release” means release of everolismus from tablets within the time of 30 minutes, e.g., as measured in the dissolution assay described herein.

[1134] Stable extended release formulations of an mTOR inhibitor disclosed herein, e.g., rapamycin or RAD001, can be characterized by an in-vitro release profile using assays known in the art, such as a dissolution assay as described herein: a dissolution vessel filled with 900 mL phosphate buffer pH 6.8 containing sodium dodecyl sulfate 0.2% at 37° C. and the dissolution is performed using a paddle method at 75 rpm according to USP by according to USP testing monograph 711, and Ph.Eur. testing monograph 2.9.3. respectively.

[1135] In some embodiments, stable extended release formulations of an mTOR inhibitor disclosed herein, e.g., rapamycin or RAD001, release the mTOR inhibitor in the in-vitro release assay according to following release specifications:
[1136] 0.5h: <45%, or <40, e.g., <30%
[1137] 1h: 20-80%, e.g., 30-60%
[1138] 2h: >50%, or >70%, e.g., >75%
[1139] 3h: >60%, or >65%, e.g., >85%, e.g., >90%.

[1140] In some embodiments, stable extended release formulations of an mTOR inhibitor disclosed herein, e.g., rapamycin or RAD001, release 50% of the mTOR inhibitor not earlier than 45, 60, 75, 90, 105 min or 120 min in the in-vitro dissolution assay.

### Biopolymer Delivery Methods

[1141] In some embodiments, one or more CAR-expressing cells as disclosed herein can be administered or delivered to the subject via a biopolymer scaffold, e.g., a biopolymer implant. Biopolymer scaffolds can support or enhance the delivery, expansion, and/or dispersion of the CAR-expressing cells described herein. A biopolymer scaffold comprises a biocompatible (e.g., does not substantially induce an inflammatory or immune response) and/or a biodegradable polymer that can be naturally occurring or synthetic.

[1142] Examples of suitable biopolymers include, but are not limited to, agar, agarose, alginate, alginate/calcium phosphate cement (CPC), beta-galactosidase (B-GAL), (1, 2,3,4,6-pentaacetyl a-D-galactose), cellulose, chitin, chitosan, collagen, elastin, gelatin, hyaluronic acid collagen, hydroxyapatite, poly (3-hydroxybutyrate-co-3-hydroxy-hexanoate) (PHBHHx), poly (lactide), poly (caprolactone) (PCL), poly (lactide-co-glycolide) (PLG), polyethylene oxide (PEO), poly (lactic-co-glycolic acid) (PLGA), polypropylene oxide (PPO), polyvinyl alcohol) (PVA), silk, soy protein, and soy protein isolate, alone or in combination with any other polymer composition, in any concentration and in any ratio. The biopolymer can be augmented or modified with adhesion- or migration-promoting molecules, e.g., collagen-mimetic peptides that bind to the collagen receptor of lymphocytes, and/or stimulatory molecules to enhance the delivery, expansion, or function, e.g., anti-cancer activity, of the cells to be delivered. The biopolymer scaffold can be an injectable, e.g., a gel or a semi-solid, or a solid composition.

[1143] In some embodiments, CAR-expressing cells described herein are seeded onto the biopolymer scaffold prior to delivery to the subject. In embodiments, the biopolymer scaffold further comprises one or more additional therapeutic agents described herein (e.g., another CAR-expressing cell, an antibody, or a small molecule) or agents that enhance the activity of a CAR-expressing cell, e.g., incorporated or conjugated to the biopolymers of the scaffold. In embodiments, the biopolymer scaffold is injected, e.g., intratumorally, or surgically implanted at the tumor or within a proximity of the tumor sufficient to mediate an anti-tumor effect. Additional examples of biopolymer compositions and methods for their delivery are described in Stephan et al., Nature Biotechnology, 2015, 33:97-101; and WO2014/110591.

### Pharmaceutical Compositions and Treatments

[1144] Pharmaceutical compositions of the present invention may comprise an anti-target CAR-expressing cell, e.g., a plurality of anti-target CAR-expressing cells, as described herein, in combination with one or more pharmaceutically or physiologically acceptable carriers, diluents or excipients. Such compositions may comprise buffers such as neutral buffered saline, phosphate buffered saline and the like; carbohydrates such as glucose, mannose, sucrose or dextrans, mannitol; proteins; polypeptides or amino acids such as glycine; antioxidants; chelating agents such as EDTA or glutathione; adjuvants (e.g., aluminum hydroxide); and preservatives. Compositions of the present invention are in one aspect formulated for intravenous administration.

[1145] Pharmaceutical compositions of the present invention may be administered in a manner appropriate to the disease to be treated (or prevented). The quantity and frequency of administration will be determined by such factors as the condition of the patient, and the type and severity of the patient's disease, although appropriate dosages may be determined by clinical trials.

[1146] In one embodiment, the pharmaceutical composition is substantially free of, e.g., there are no detectable levels of a contaminant, e.g., selected from the group consisting of endotoxin, mycoplasma, replication competent lentivirus (RCL), p24, VSV-G nucleic acid, HIV gag, residual anti-CD3/anti-CD28 coated beads, mouse antibodies, pooled human serum, bovine serum albumin, bovine serum, culture media components, vector packaging cell or plasmid components, a bacterium and a fungus. In one embodiment, the bacterium is at least one selected from the group consisting of Alcaligenes faecalis, Candida albicans, Escherichia coli, Haemophilus influenza, Neisseria meningitides, Pseudomonas aeruginosa, Staphylococcus aureus, Streptococcus pneumonia, and Streptococcus pyogenes group A.

[1147] When “an immunologically effective amount,” “an anti-tumor effective amount,” “a tumor-inhibiting effective amount,” or “therapeutic amount” is indicated, the precise amount of the compositions of the present invention to be administered can be determined by a physician with consideration of individual differences in age, weight, tumor size, extent of infection or metastasis, and condition of the patient (subject). It can generally be stated that a pharmaceutical composition comprising the immune effector cells (e.g., T cells, NK cells) described herein may be administered at a dosage of 104 to 10⁹ cells/kg body weight, in some instances 105 to 10⁶ cells/kg body weight, including all integer values within those ranges. T cell compositions may also be administered multiple times at these dosages. The cells can be administered by using infusion techniques that are commonly known in immunotherapy (see, e.g., Rosenberg et al., New Eng. J. of Med. 319:1676, 1988).

[1148] In certain aspects, it may be desired to administer activated immune effector cells (e.g., T cells, NK cells) to a subject and then subsequently redraw blood (or have an apheresis performed), activate immune effector cells (e.g., T cells, NK cells) therefrom according to the present invention, and reinfuse the patient with these activated and expanded immune effector cells (e.g., T cells, NK cells). This process can be carried out multiple times every few weeks. In certain aspects, immune effector cells (e.g., T cells, NK cells) can be activated from blood draws of from 10cc to 400cc. In certain aspects, immune effector cells (e.g., T cells, NK cells) are activated from blood draws of 20cc, 30cc, 40cc, 50cc, 60cc, 70cc, 80cc, 90cc, or 100cc.

[1149] The administration of the subject compositions may be carried out in any convenient manner, including by aerosol inhalation, injection, ingestion, transfusion, implantation or transplantation. The compositions described herein may be administered to a patient trans arterially, subcutaneously, intradermally, intratumorally, intranodally, intramedullary, intramuscularly, by intravenous (i.v.) injection, or intraperitoneally. In one aspect, the T cell compositions of the present invention are administered to a patient by intradermal or subcutaneous injection. In one aspect, the T cell compositions of the present invention are administered by i.v. injection. The compositions of immune effector cells (e.g., T cells, NK cells) may be injected directly into a tumor, lymph node, or site of infection.

[1150] In a particular exemplary aspect, subjects may undergo leukapheresis, wherein leukocytes are collected, enriched, or depleted ex vivo to select and/or isolate the cells of interest, e.g., T cells. These T cell isolates may be expanded by methods known in the art and treated such that one or more anti-target CAR constructs of the invention may be introduced, thereby creating a anti-target CAR T cell of the invention. Subjects in need thereof may subsequently undergo standard treatment with high dose chemotherapy followed by peripheral blood stem cell transplantation. In certain aspects, following or concurrent with the transplant, subjects receive an infusion of the expanded anti-target CAR T cells of the present invention. In an additional aspect, expanded cells are administered before or following surgery.

[1151] The dosage of the above treatments to be administered to a patient will vary with the precise nature of the condition being treated and the recipient of the treatment. The scaling of dosages for human administration can be performed according to art-accepted practices. The dose for CAMPATH, for example, will generally be in the range 1 to about 100 mg for an adult patient, usually administered daily for a period between 1 and 30 days. The preferred daily dose is 1 to 10 mg per day although in some instances larger doses of up to 40 mg per day may be used (described in U.S. Pat. No. 6,120,766).

[1152] In one embodiment, the anti-target CAR is introduced into immune effector cells (e.g., T cells, NK cells), e.g., using in vitro transcription, and the subject (e.g., human) receives an initial administration of anti-target CAR immune effector cells (e.g., T cells, NK cells) of the invention, and one or more subsequent administrations of the anti-target CAR immune effector cells (e.g., T cells, NK cells) of the invention, wherein the one or more subsequent administrations are administered less than 15 days, e.g., 14, 13, 12, 11, 10, 9, 8, 7, 6, 5, 4, 3, or 2 days after the previous administration. In one embodiment, more than one administration of the anti-target CAR immune effector cells (e.g., T cells, NK cells) of the invention are administered to the subject (e.g., human) per week, e.g., 2, 3, or 4 administrations of the anti-target CAR immune effector cells (e.g., T cells, NK cells) of the invention are administered per week. In one embodiment, the subject (e.g., human subject) receives more than one administration of the anti-target CAR immune effector cells (e.g., T cells, NK cells) per week (e.g., 2, 3 or 4 administrations per week) (also referred to herein as a cycle), followed by a week of no anti-target CAR immune effector cells (e.g., T cells, NK cells) administrations, and then one or more additional administration of the anti-target CAR immune effector cells (e.g., T cells, NK cells) (e.g., more than one administration of the anti-target CAR immune effector cells (e.g., T cells, NK cells) per week) is administered to the subject. In another embodiment, the subject (e.g., human subject) receives more than one cycle of anti-target CAR immune effector cells (e.g., T cells, NK cells), and the time between each cycle is less than 10, 9, 8, 7, 6, 5, 4, or 3 days. In one embodiment, the anti-target CAR immune effector cells (e.g., T cells, NK cells) are administered every other day for 3 administrations per week. In one embodiment, the anti-target CAR immune effector cells (e.g., T cells, NK cells) of the invention are administered for at least two, three, four, five, six, seven, eight or more weeks.

[1153] In one aspect, anti-target CAR-expressing cells of the present inventions are generated using lentiviral viral vectors, such as lentivirus. Cells, e.g., CARTs, generated that way will have stable anti-target CAR expression.

[1154] In one aspect, anti-target CAR-expressing cells, e.g., CARTs, are generated using a viral vector such as a gammaretroviral vector, e.g., a gammaretroviral vector described herein. CARTs generated using these vectors can have stable anti-target CAR expression.

[1155] In one aspect, CARTs transiently express anti-target CAR vectors for 4, 5, 6, 7, 8, 9, 10, 11, 12, 13, 14, 15 days after transduction. Transient expression of anti-target CARs can be effected by RNA anti-target CAR vector delivery. In one aspect, the anti-target CAR RNA is transduced into the T cell by electroporation.

[1156] A potential issue that can arise in patients being treated using transiently expressing anti-target CAR immune effector cells (e.g., T cells, NK cells) (particularly with murine scFv bearing CARTs) is anaphylaxis after multiple treatments.

[1157] Without being bound by this theory, it is believed that such an anaphylactic response might be caused by a patient developing humoral anti-anti-target CAR response, i.e., anti-anti-target CAR antibodies having an anti-IgE isotype. It is thought that a patient's antibody producing cells undergo a class switch from IgG isotype (that does not cause anaphylaxis) to IgE isotype when there is a ten to fourteen day break in exposure to antigen.

[1158] If a patient is at high risk of generating an anti-anti-target CAR antibody response during the course of transient anti-target CAR therapy (such as those generated by RNA transductions), CART infusion breaks should not last more than ten to fourteen days.

### Examples

[1159] The invention is further described in detail by reference to the following experimental examples. These examples are provided for purposes of illustration only, and are not intended to be limiting unless otherwise specified. Thus, the invention should in no way be construed as being limited to the following examples, but rather, should be construed to encompass any and all variations which become evident as a result of the teaching provided herein.

### Example 1: A Cellular Antidote to Specifically Deplete Anti-CD19 Chimeric Antigen Receptor (CAR19) Positive Cells

### INTRODUCTION

[1160] Anti-CD19 chimeric antigen receptor T cells (CART19, CTL019) have led to clinical responses in relapsing or refractory (r/r) B-cell acute lymphoblastic leukemia (B-ALL). With the approval of CTL019 for patients with B-ALL, increasing numbers of patients will be exposed to this therapy. A patient was reported who relapsed with CD19-negative, CAR19-expressing leukemia, likely due to inadvertent transduction of a leukemic cell with the CAR19 lentivirus during CTL019 manufacturing. The high expression of the CAR in leukemic cells and its absence from normal tissues make it a good engineered tumor target. Anti-CAR19 CAR T cells were therefore developed with the goal of specifically targeting CAR19+B-ALL.

### Methods

[1161] Two anti-CAR19 CAR using an anti-CAR19 idiotype scFv (clone 136.20.1, original clone kind gift of Dr. Laurence Cooper) testing two light chain orientations for the scFv: light to heavy (L2H) and heavy to light (H2L) were designed. We cloned the constructs into our standard backbone containing the CD8 hinge and trans-membrane domains, 4-1BB costimulatory and CD3z signaling domain. The constructs were packaged into a lentiviral vector and used to transduce normal donor T cells. As target cells, we used ex-vivo expanded primary leukemic blasts from the CAR19+relapsed patient (CHP-107), as well as a luciferized B-ALL cell line (NALM6) transduced with the full-length CAR19 used in our clinical studies. Of note, the expression of CAR19 in CD19+NALMA cells led to apparent loss of CD19 by flow cytometry. We tested CART function in vitro with luciferase-based killing assays, and in vivo in human xenograft models using NOD-SCID gamma chain deficient (NSG) mice.

### Results

[1162] Both L2H and H2L anti-CAR19 CAR were efficiently expressed on T cells as detected by flow cytometry. In vitro CART-CAR19 efficiently killed CAR19+B-ALL (NALM6) (L2H orientation: p<0.0001; H2L: p=0.0063) but not wild-type (WT) (p=NS). NALM6 (FIG. 1A). We compared the in vivo growth rate of CAR19+NALM6 versus WT and did not observe any difference. Next, we tested our lead anti-CAR19 CART (L2H) in vivo. NSG mice were engrafted with either CAR19+NALM6 (CD19-) or luciferase-positive relapsed CHP107 leukemia blasts (CAR19+, CD19-). At day 7 or 14 mice were randomized to receive no treatment, control T cells (UTD), CART19 or CART-CAR19 L2H. In both xenograft models, CART19 and UTD cells were not able to control disease progression. In contrast, CART-CAR19 L2H cells showed leukemia control in the CHP107R xenograft model (FIG. 1B).

### CONCLUSIONS

[1163] The acquisition of CAR expression by leukemic cells during CART manufacturing is a rare event that can lead to loss of CD19 expression, and potential resistance to CD19-directed immunotherapy. However, the CAR becomes a tumor-specific antigen that can be targeted specifically without any off-target toxicity. Here we report for the first time, a proof-of-concept that the mechanism of immunoescape by leukemia can be used as a point of vulnerability. This finding also supports the use of anti-CAR19 CART as an “antidote” to CAR19 T cells for those patients who have been in deep leukemia remission for several years but still suffer B cell aplasia.

### Example 2: Anti-CAR CART to Deplete CART19

[1164] This Example describes the use of anti-CAR CART cells to deplete CART19 expressing cells. Without wishing to be bound by theory, in some embodiments, CART19 cells can, e.g., target or kill cells expressing anti-CAR CART expressing cells. Accordingly, this experiment was designed to test the optimal ratio of anti-target CAR cells: target CAR cells.

[1165] Normal donor T cells were used to generate CART cells using standard protocols and lentivirus encoding the different constructs as described below. Cells were transduced with constructs expressing anti-CAR CART (clones c3025 (anti-CAR19 CAR H2L) or c3026 (anti-CAR19 CAR L2H)), CART19 (c2228; FMC63) or CART22 (c2270; m971). Transduction efficiencies were normalized by CAR expression. Cells expressing anti-CAR CART were labeled with CFSE, and cells expressing CART19 or CART22 were labeled with Cell tracker violet (CTV). The two CART expressing populations, e.g., anti-CAR CART population and CART19 population; or anti-CAR CART population and CART22 population, were co-cultured and relative killing was measured by flow cytometry. The cells were co-cultured at different ratios and the ratio of CFSE: CTV signal was assessed by flow cytometry at 24 and 48 hours as indicated in FIGS. 2A-2D.

[1166] The data depicted in FIGS. 2A-2D show the importance of dosing of the anti-CAR CART as compared to CART19 expressing cells. The results demonstrate that, in some embodiments, a minimum ratio of 1:1 of anti-CAR-CART cells: target CART cells is required to allow anti-CAR CART cells to persist, e.g., prevail over, CART19 cells.

### EQUIVALENTS

[1167] The disclosures of each and every patent, patent application, and publication cited herein are hereby incorporated herein by reference in their entirety. While this invention has been disclosed with reference to specific aspects, it is apparent that other aspects and variations of this invention may be devised by others skilled in the art without departing from the true spirit and scope of the invention. The appended claims are intended to be construed to include all such aspects and equivalent variations.

The application's sequence listing, which the Patent Office published only in electronic form, follows.

SEQUENCE LISTING (2028 sequences)

SEQ ID NO: 1-9 - skipped (9 entries)

SEQ ID NO: 10 - protein, 10 aa, synthetic construct
  REGION 1..10: note = source = /note="Description of Artificial Sequence: Synthetic peptide"
GGGGSGGGGS

SEQ ID NO: 11 - DNA, 30 bp, synthetic construct
  misc_feature 1..30: note = source = /note="Description of Artificial Sequence: Synthetic oligonucleotide"
  source 1..30: mol_type = other DNA
ggtggcggaggttctggaggtggaggttcc

SEQ ID NO: 12 - protein, 24 aa, synthetic construct
  REGION 1..24: note = source = /note="Description of Artificial Sequence: Synthetic peptide"
IYIWAPLAGTCGVLLLSLVITLYC

SEQ ID NO: 13 - DNA, 72 bp, synthetic construct
  misc_feature 1..72: note = source = /note="Description of Artificial Sequence: Synthetic oligonucleotide"
  source 1..72: mol_type = other DNA
atctacatctgggcgcccttggccgggacttgtggggtccttctcctgtcactggttatcaccctttactgc

SEQ ID NO: 14 - protein, 42 aa, synthetic construct
  REGION 1..42: note = source = /note="Description of Artificial Sequence: Synthetic polypeptide"
KRGRKKLLYIFKQPFMRPVQTTQEEDGCSCRFPEEEEGGCEL

SEQ ID NO: 15 - DNA, 126 bp, synthetic construct
  misc_feature 1..126: note = source = /note="Description of Artificial Sequence: Synthetic polynucleotide"
  source 1..126: mol_type = other DNA
aaacggggcagaaagaaactcctgtatatattcaaacaaccatttatgagaccagtacaaactactcaagaggaagatggctgtagctgccgatttccagaagaagaagaaggaggatgtgaactg

SEQ ID NO: 16 - protein, 48 aa, synthetic construct
  REGION 1..48: note = source = /note="Description of Artificial Sequence: Synthetic polypeptide"
QRRKYRSNKGESPVEPAEPCRYSCPREEEGSTIPIQEDYRKPEPACSP

SEQ ID NO: 17 - DNA, 123 bp, synthetic construct
  misc_feature 1..123: note = source = /note="Description of Artificial Sequence: Synthetic polynucleotide"
  source 1..123: mol_type = other DNA
aggagtaagaggagcaggctcctgcacagtgactacatgaacatgactccccgccgccccgggcccacccgcaagcattaccagccctatgccccaccacgcgacttcgcagcctatcgctcc

SEQ ID NO: 18 - protein, 112 aa, synthetic construct
  REGION 1..112: note = source = /note="Description of Artificial Sequence: Synthetic polypeptide"
RVKFSRSADAPAYKQGQNQLYNELNLGRREEYDVLDKRRGRDPEMGGKPRRKNPQEGLYNELQKDKMAEAYSEIGMKGERRRGKGHDGLYQGLSTATKDTYDALHMQALPPR

SEQ ID NO: 19 - DNA, 336 bp, synthetic construct
  misc_feature 1..336: note = source = /note="Description of Artificial Sequence: Synthetic polynucleotide"
  source 1..336: mol_type = other DNA
agagtgaagttcagcaggagcgcagacgcccccgcgtacaagcagggccagaaccagctctataacgagctcaatctaggacgaagagaggagtacgatgttttggacaagagacgtggccgggaccctgagatggggggaaagccgagaaggaagaaccctcaggaaggcctgtacaatgaactgcagaaagataagatggcggaggcctacagtgagattgggatgaaaggcgagcgccggaggggcaaggggcacgatggcctttaccagggtctcagtacagccaccaaggacacctacgacgcccttcacatgcaggccctgccccctcgc

SEQ ID NO: 20 - protein, 112 aa, synthetic construct
  REGION 1..112: note = source = /note="Description of Artificial Sequence: Synthetic polypeptide"
RVKFSRSADAPAYQQGQNQLYNELNLGRREEYDVLDKRRGRDPEMGGKPRRKNPQEGLYNELQKDKMAEAYSEIGMKGERRRGKGHDGLYQGLSTATKDTYDALHMQALPPR

SEQ ID NO: 21 - DNA, 336 bp, synthetic construct
  misc_feature 1..336: note = source = /note="Description of Artificial Sequence: Synthetic polynucleotide"
  source 1..336: mol_type = other DNA
agagtgaagttcagcaggagcgcagacgcccccgcgtaccagcagggccagaaccagctctataacgagctcaatctaggacgaagagaggagtacgatgttttggacaagagacgtggccgggaccctgagatggggggaaagccgagaaggaagaaccctcaggaaggcctgtacaatgaactgcagaaagataagatggcggaggcctacagtgagattgggatgaaaggcgagcgccggaggggcaaggggcacgatggcctttaccagggtctcagtacagccaccaaggacacctacgacgcccttcacatgcaggccctgccccctcgc

SEQ ID NO: 22 - protein, 5 aa, synthetic construct
  REGION 1..5: note = source = /note="Description of Artificial Sequence: Synthetic peptide"
GGGGS

SEQ ID NO: 23 - DNA, 30 bp, synthetic construct; identical to SEQ ID NO: 11
  misc_feature 1..30: note = source = /note="Description of Artificial Sequence: Synthetic oligonucleotide"
  source 1..30: mol_type = other DNA

SEQ ID NO: 24 - protein, 150 aa, synthetic construct [sequence omitted]

SEQ ID NO: 25 - DNA, 450 bp, synthetic construct
  misc_feature 1..450: note = source = /note="Description of Artificial Sequence: Synthetic polynucleotide"
  source 1..450: mol_type = other DNA
cccggatggtttctggactctccggatcgcccgtggaatcccccaaccttctcaccggcactcttggttgtgactgagggcgataatgcgaccttcacgtgctcgttctccaacacctccgaatcattcgtgctgaactggtaccgcatgagcccgtcaaaccagaccgacaagctcgccgcgtttccggaagatcggtcgcaaccgggacaggattgtcggttccgcgtgactcaactgccgaatggcagagacttccacatgagcgtggtccgcgctaggcgaaacgactccgggacctacctgtgcggagccatctcgctggcgcctaaggcccaaatcaaagagagcttgagggccgaactgagagtgaccgagcgcagagctgaggtgccaactgcacatccatccccatcgcctcggcctgcggggcagtttcagaccctggtc

SEQ ID NO: 26 - protein, 394 aa, synthetic construct
  REGION 1..394: note = source = /note="Description of Artificial Sequence: Synthetic polypeptide"
MALPVTALLLPLALLLHAARPPGWFLDSPDRPWNPPTFSPALLVVTEGDNATFTCSFSNTSESFVLNWYRMSPSNQTDKLAAFPEDRSQPGQDCRFRVTQLPNGRDFHMSVVRARRNDSGTYLCGAISLAPKAQIKESLRAELRVTERRAEVPTAHPSPSPRPAGQFQTLVTTTPAPRPPTPAPTIASQPLSLRPEACRPAAGGAVHTRGLDFACDIYIWAPLAGTCGVLLLSLVITLYCKRGRKKLLYIFKQPFMRPVQTTQEEDGCSCRFPEEEEGGCELRVKFSRSADAPAYKQGQNQLYNELNLGRREEYDVLDKRRGRDPEMGGKPRRKNPQEGLYNELQKDKMAEAYSEIGMKGERRRGKGHDGLYQGLSTATKDTYDALHMQALPPR

SEQ ID NO: 27 - DNA, 1182 bp, synthetic construct
  misc_feature 1..1182: note = source = /note="Description of Artificial Sequence: Synthetic polynucleotide"
  source 1..1182: mol_type = other DNA
atggccctccctgtcactgccctgcttctccccctcgcactcctgctccacgccgctagaccacccggatggtttctggactctccggatcgcccgtggaatcccccaaccttctcaccggcactcttggttgtgactgagggcgataatgcgaccttcacgtgctcgttctccaacacctccgaatcattcgtgctgaactggtaccgcatgagcccgtcaaaccagaccgacaagctcgccgcgtttccggaagatcggtcgcaaccgggacaggattgtcggttccgcgtgactcaactgccgaatggcagagacttccacatgagcgtggtccgcgctaggcgaaacgactccgggacctacctgtgcggagccatctcgctggcgcctaaggcccaaatcaaagagagcttgagggccgaactgagagtgaccgagcgcagagctgaggtgccaactgcacatccatccccatcgcctcggcctgcggggcagtttcagaccctggtcacgaccactccggcgccgcgcccaccgactccggccccaactatcgcgagccagcccctgtcgctgaggccggaagcatgccgccctgccgccggaggtgctgtgcatacccggggattggacttcgcatgcgacatctacatttgggctcctctcgccggaacttgtggcgtgctccttctgtccctggtcatcaccctgtactgcaagcggggtcggaaaaagcttctgtacattttcaagcagcccttcatgaggcccgtgcaaaccacccaggaggaggacggttgctcctgccggttccccgaagaggaagaaggaggttgcgagctgcgcgtgaagttctcccggagcgccgacgcccccgcctataagcagggccagaaccagctgtacaacgaactgaacctgggacggcgggaagagtacgatgtgctggacaagcggcgcggccgggaccccgaaatgggcgggaagcctagaagaaagaaccctcaggaaggcctgtataacgagctgcagaaggacaagatggccgaggcctactccgaaattgggatgaagggagagcggcggaggggaaaggggcacgacggcctgtaccaaggactgtccaccgccaccaaggacacatacgatgccctgcacatgcaggcccttccccctcgc

SEQ ID NO: 28 - protein, 40 aa, synthetic construct
  SITE 1..40: note = /note="This sequence may encompass 1-10 'Gly Gly Gly Ser' repeating units"
  REGION 1..40: note = source = /note="Description of Artificial Sequence: Synthetic polypeptide"
GGGSGGGSGGGSGGGSGGGSGGGSGGGSGGGSGGGSGGGS

SEQ ID NO: 29 - protein, 20 aa, synthetic construct
  REGION 1..20: note = source = /note="Description of Artificial Sequence: Synthetic peptide"
GGGGSGGGGSGGGGSGGGGS

SEQ ID NO: 30 - protein, 15 aa, synthetic construct
  REGION 1..15: note = source = /note="Description of Artificial Sequence: Synthetic peptide"
GGGGSGGGGSGGGGS

SEQ ID NO: 31 - protein, 4 aa, synthetic construct
  REGION 1..4: note = source = /note="Description of Artificial Sequence: Synthetic peptide"
GGGS

SEQ ID NO: 32 - DNA, 2000 bp, synthetic construct
  misc_feature 1..2000: note = /note="This sequence may encompass 50-2000 nucleotides"
  misc_feature 1..2000: note = source = /note="Description of Artificial Sequence: Synthetic polynucleotide"
  source 1..2000: mol_type = other DNA
aaaaaaaaaaaaaaaaaaaaaaaaaaaaaaaaaaaaaaaaaaaaaaaaaaaaaaaaaaaaaaaaaaaaaaaaaaaaaaaaaaaaaaaaaaaaaaaaaaaaaaaaaaaaaaaaaaaaaaaaaaaaaaaaaaaaaaaaaaaaaaaaaaaaaaaaaaaaaaaaaaaaaaaaaaaaaaaaaaaaaaaaaaaaaaaaaaaaaaaaaaaaaaaaaaaaaaaaaaaaaaaaaaaaaaaaaaaaaaaaaaaaaaaaaaaaaaaaaaaaaaaaaaaaaaaaaaaaaaaaaaaaaaaaaaaaaaaaaaaaaaaaaaaaaaaaaaaaaaaaaaaaaaaaaaaaaaaaaaaaaaaaaaaaaaaaaaaaaaaaaaaaaaaaaaaaaaaaaaaaaaaaaaaaaaaaaaaaaaaaaaaaaaaaaaaaaaaaaaaaaaaaaaaaaaaaaaaaaaaaaaaaaaaaaaaaaaaaaaaaaaaaaaaaaaaaaaaaaaaaaaaaaaaaaaaaaaaaaaaaaaaaaaaaaaaaaaaaaaaaaaaaaaaaaaaaaaaaaaaaaaaaaaaaaaaaaaaaaaaaaaaaaaaaaaaaaaaaaaaaaaaaaaaaaaaaaaaaaaaaaaaaaaaaaaaaaaaaaaaaaaaaaaaaaaaaaaaaaaaaaaaaaaaaaaaaaaaaaaaaaaaaaaaaaaaaaaaaaaaaaaaaaaaaaaaaaaaaaaaaaaaaaaaaaaaaaaaaaaaaaaaaaaaaaaaaaaaaaaaaaaaaaaaaaaaaaaaaaaaaaaaaaaaaaaaaaaaaaaaaaaaaaaaaaaaaaaaaaaaaaaaaaaaaaaaaaaaaaaaaaaaaaaaaaaaaaaaaaaaaaaaaaaaaaaaaaaaaaaaaaaaaaaaaaaaaaaaaaaaaaaaaaaaaaaaaaaaaaaaaaaaaaaaaaaaaaaaaaaaaaaaaaaaaaaaaaaaaaaaaaaaaaaaaaaaaaaaaaaaaaaaaaaaaaaaaaaaaaaaaaaaaaaaaaaaaaaaaaaaaaaaaaaaaaaaaaaaaaaaaaaaaaaaaaaaaaaaaaaaaaaaaaaaaaaaaaaaaaaaaaaaaaaaaaaaaaaaaaaaaaaaaaaaaaaaaaaaaaaaaaaaaaaaaaaaaaaaaaaaaaaaaaaaaaaaaaaaaaaaaaaaaaaaaaaaaaaaaaaaaaaaaaaaaaaaaaaaaaaaaaaaaaaaaaaaaaaaaaaaaaaaaaaaaaaaaaaaaaaaaaaaaaaaaaaaaaaaaaaaaaaaaaaaaaaaaaaaaaaaaaaaaaaaaaaaaaaaaaaaaaaaaaaaaaaaaaaaaaaaaaaaaaaaaaaaaaaaaaaaaaaaaaaaaaaaaaaaaaaaaaaaaaaaaaaaaaaaaaaaaaaaaaaaaaaaaaaaaaaaaaaaaaaaaaaaaaaaaaaaaaaaaaaaaaaaaaaaaaaaaaaaaaaaaaaaaaaaaaaaaaaaaaaaaaaaaaaaaaaaaaaaaaaaaaaaaaaaaaaaaaaaaaaaaaaaaaaaaaaaaaaaaaaaaaaaaaaaaaaaaaaaaaaaaaaaaaaaaaaaaaaaaaaaaaaaaaaaaaaaaaaaaaaaaaaaaaaaaaaaaaaaaaaaaaaaaaaaaaaaaaaaaaaaaaaaaaaaaaaaaaaaaaaaaaaaaaaaaaaaaaaaaaaaaaaaaaaaaaaaaaaaaaaaaaaaaaaaaaaaaaaaaaaaaaaaaaaaaaaaaaaaaaaaaaaaaaaaaaaaaaaaaaaaaaaaaaaaaaaaaaaaaaaaaaaaaaaaaaaaaaaaaaaaaaaaaaaaaaaaaaaaaaaaaaaaaaaaaaaaaaaaaaaaaaaaaaaaaaaaaaaaaaaaaaaaaaaaaaaaaaaaaaaaaaaaaaaaaaaaaaaaaaaaaaaaaaaaaaaaaaaaaaaaaaaaaaaaaaaaaaaaaaaaaaaaaaaaaaaaaaaaaaaaaaaaaaaaaaaaaaaaaaaaaaaaaaaaaaaaaaaaaaaaaaaaaaaaaaaaaaaaaaaaaaaaaaaaaaaaa

SEQ ID NO: 33 - DNA, 150 bp, synthetic construct
  misc_feature 1..150: note = source = /note="Description of Artificial Sequence: Synthetic polynucleotide"
  source 1..150: mol_type = other DNA
aaaaaaaaaaaaaaaaaaaaaaaaaaaaaaaaaaaaaaaaaaaaaaaaaaaaaaaaaaaaaaaaaaaaaaaaaaaaaaaaaaaaaaaaaaaaaaaaaaaaaaaaaaaaaaaaaaaaaaaaaaaaaaaaaaaaaaaaaaaaaaaaaaaaaa

SEQ ID NO: 34 - DNA, 5000 bp, synthetic construct
  misc_feature 1..5000: note = /note="This sequence may encompass 50-5000 nucleotides"
  misc_feature 1..5000: note = source = /note="Description of Artificial Sequence: Synthetic polynucleotide"
  misc_feature 1..5000: note = source = /note="See specification as filed for detailed description of substitutions and preferred embodiments"
  source 1..5000: mol_type = other DNA
aaaaaaaaaaaaaaaaaaaaaaaaaaaaaaaaaaaaaaaaaaaaaaaaaaaaaaaaaaaaaaaaaaaaaaaaaaaaaaaaaaaaaaaaaaaaaaaaaaaaaaaaaaaaaaaaaaaaaaaaaaaaaaaaaaaaaaaaaaaaaaaaaaaaaaaaaaaaaaaaaaaaaaaaaaaaaaaaaaaaaaaaaaaaaaaaaaaaaaaaaaaaaaaaaaaaaaaaaaaaaaaaaaaaaaaaaaaaaaaaaaaaaaaaaaaaaaaaaaaaaaaaaaaaaaaaaaaaaaaaaaaaaaaaaaaaaaaaaaaaaaaaaaaaaaaaaaaaaaaaaaaaaaaaaaaaaaaaaaaaaaaaaaaaaaaaaaaaaaaaaaaaaaaaaaaaaaaaaaaaaaaaaaaaaaaaaaaaaaaaaaaaaaaaaaaaaaaaaaaaaaaaaaaaaaaaaaaaaaaaaaaaaaaaaaaaaaaaaaaaaaaaaaaaaaaaaaaaaaaaaaaaaaaaaaaaaaaaaaaaaaaaaaaaaaaaaaaaaaaaaaaaaaaaaaaaaaaaaaaaaaaaaaaaaaaaaaaaaaaaaaaaaaaaaaaaaaaaaaaaaaaaaaaaaaaaaaaaaaaaaaaaaaaaaaaaaaaaaaaaaaaaaaaaaaaaaaaaaaaaaaaaaaaaaaaaaaaaaaaaaaaaaaaaaaaaaaaaaaaaaaaaaaaaaaaaaaaaaaaaaaaaaaaaaaaaaaaaaaaaaaaaaaaaaaaaaaaaaaaaaaaaaaaaaaaaaaaaaaaaaaaaaaaaaaaaaaaaaaaaaaaaaaaaaaaaaaaaaaaaaaaaaaaaaaaaaaaaaaaaaaaaaaaaaaaaaaaaaaaaaaaaaaaaaaaaaaaaaaaaaaaaaaaaaaaaaaaaaaaaaaaaaaaaaaaaaaaaaaaaaaaaaaaaaaaaaaaaaaaaaaaaaaaaaaaaaaaaaaaaaaaaaaaaaaaaaaaaaaaaaaaaaaaaaaaaaaaaaaaaaaaaaaaaaaaaaaaaaaaaaaaaaaaaaaaaaaaaaaaaaaaaaaaaaaaaaaaaaaaaaaaaaaaaaaaaaaaaaaaaaaaaaaaaaaaaaaaaaaaaaaaaaaaaaaaaaaaaaaaaaaaaaaaaaaaaaaaaaaaaaaaaaaaaaaaaaaaaaaaaaaaaaaaaaaaaaaaaaaaaaaaaaaaaaaaaaaaaaaaaaaaaaaaaaaaaaaaaaaaaaaaaaaaaaaaaaaaaaaaaaaaaaaaaaaaaaaaaaaaaaaaaaaaaaaaaaaaaaaaaaaaaaaaaaaaaaaaaaaaaaaaaaaaaaaaaaaaaaaaaaaaaaaaaaaaaaaaaaaaaaaaaaaaaaaaaaaaaaaaaaaaaaaaaaaaaaaaaaaaaaaaaaaaaaaaaaaaaaaaaaaaaaaaaaaaaaaaaaaaaaaaaaaaaaaaaaaaaaaaaaaaaaaaaaaaaaaaaaaaaaaaaaaaaaaaaaaaaaaaaaaaaaaaaaaaaaaaaaaaaaaaaaaaaaaaaaaaaaaaaaaaaaaaaaaaaaaaaaaaaaaaaaaaaaaaaaaaaaaaaaaaaaaaaaaaaaaaaaaaaaaaaaaaaaaaaaaaaaaaaaaaaaaaaaaaaaaaaaaaaaaaaaaaaaaaaaaaaaaaaaaaaaaaaaaaaaaaaaaaaaaaaaaaaaaaaaaaaaaaaaaaaaaaaaaaaaaaaaaaaaaaaaaaaaaaaaaaaaaaaaaaaaaaaaaaaaaaaaaaaaaaaaaaaaaaaaaaaaaaaaaaaaaaaaaaaaaaaaaaaaaaaaaaaaaaaaaaaaaaaaaaaaaaaaaaaaaaaaaaaaaaaaaaaaaaaaaaaaaaaaaaaaaaaaaaaaaaaaaaaaaaaaaaaaaaaaaaaaaaaaaaaaaaaaaaaaaaaaaaaaaaaaaaaaaaaaaaaaaaaaaaaaaaaaaaaaaaaaaaaaaaaaaaaaaaaaaaaaaaaaaaaaaaaaaaaaaaaaaaaaaaaaaaaaaaaaaaaaaaaaaaaaaaaaaaaaaaaaaaaaaaaaaaaaaaaaaaaaaaaaaaaaaaaaaaaaaaaaaaaaaaaaaaaaaaaaaaaaaaaaaaaaaaaaaaaaaaaaaaaaaaaaaaaaaaaaaaaaaaaaaaaaaaaaaaaaaaaaaaaaaaaaaaaaaaaaaaaaaaaaaaaaaaaaaaaaaaaaaaaaaaaaaaaaaaaaaaaaaaaaaaaaaaaaaaaaaaaaaaaaaaaaaaaaaaaaaaaaaaaaaaaaaaaaaaaaaaaaaaaaaaaaaaaaaaaaaaaaaaaaaaaaaaaaaaaaaaaaaaaaaaaaaaaaaaaaaaaaaaaaaaaaaaaaaaaaaaaaaaaaaaaaaaaaaaaaaaaaaaaaaaaaaaaaaaaaaaaaaaaaaaaaaaaaaaaaaaaaaaaaaaaaaaaaaaaaaaaaaaaaaaaaaaaaaaaaaaaaaaaaaaaaaaaaaaaaaaaaaaaaaaaaaaaaaaaaaaaaaaaaaaaaaaaaaaaaaaaaaaaaaaaaaaaaaaaaaaaaaaaaaaaaaaaaaaaaaaaaaaaaaaaaaaaaaaaaaaaaaaaaaaaaaaaaaaaaaaaaaaaaaaaaaaaaaaaaaaaaaaaaaaaaaaaaaaaaaaaaaaaaaaaaaaaaaaaaaaaaaaaaaaaaaaaaaaaaaaaaaaaaaaaaaaaaaaaaaaaaaaaaaaaaaaaaaaaaaaaaaaaaaaaaaaaaaaaaaaaaaaaaaaaaaaaaaaaaaaaaaaaaaaaaaaaaaaaaaaaaaaaaaaaaaaaaaaaaaaaaaaaaaaaaaaaaaaaaaaaaaaaaaaaaaaaaaaaaaaaaaaaaaaaaaaaaaaaaaaaaaaaaaaaaaaaaaaaaaaaaaaaaaaaaaaaaaaaaaaaaaaaaaaaaaaaaaaaaaaaaaaaaaaaaaaaaaaaaaaaaaaaaaaaaaaaaaaaaaaaaaaaaaaaaaaaaaaaaaaaaaaaaaaaaaaaaaaaaaaaaaaaaaaaaaaaaaaaaaaaaaaaaaaaaaaaaaaaaaaaaaaaaaaaaaaaaaaaaaaaaaaaaaaaaaaaaaaaaaaaaaaaaaaaaaaaaaaaaaaaaaaaaaaaaaaaaaaaaaaaaaaaaaaaaaaaaaaaaaaaaaaaaaaaaaaaaaaaaaaaaaaaaaaaaaaaaaaaaaaaaaaaaaaaaaaaaaaaaaaaaaaaaaaaaaaaaaaaaaaaaaaaaaaaaaaaaaaaaaaaaaaaaaaaaaaaaaaaaaaaaaaaaaaaaaaaaaaaaaaaaaaaaaaaaaaaaaaaaaaaaaaaaaaaaaaaaaaaaaaaaaaaaaaaaaaaaaaaaaaaaaaaaaaaaaaaaaaaaaaaaaaaaaaaaaaaaaaaaaaaaaaaaaaaaaaaaaaaaaaaaaaaaaaaaaaaaaaaaaaaaaaaaaaaaaaaaaaaaaaaaaaaaaaaaaaaaaaaaaaaaaaaaaaaaaaaaaaaaaaaaaaaaaaaaaaaaaaaaaaaaaaaaaaaaaaaaaaaaaaaaaaaaaaaaaaaaaaaaaaaaaaaaaaaaaaaaaaaaaaaaaaaaaaaaaaaaaaaaaaaaaaaaaaaaaaaaaaaaaaaaaaaaaaaaaaaaaaaaaaaaaaaaaaaaaaaaaaaaaaaaaaaaaaaaaaaaaaaaaaaaaaaaaaaaaaaaaaaaaaaaaaaaaaaaaaaaaaaaaaaaaaaaaaaaaaaaaaaaaaaaaaaaaaaaaaaaaaaaaaaaaaaaaaaaaaaaaaaaaaaaaaaaaaaaaaaaaaaaaaaaaaaaaaaaaaaaaaaaaaaaaaaaaaaaaaaaaaaaaaaaaaaaaaaaaaaaaaaaaaaaaaaaaaaaaaaaaaaaaaaaaaaaaaaaaaaaaaaaaaaaaaaaaaaaaaaaaaaaaaaaaaaaaaaaaaaaaaaaaaaaaaaaaaaaaaaaaaaaaaaaaaaaaaaaaaaaaaaaaaaaaaaaaaaaaaaaaaaaaaaaaaaaaaaaaaaaaaaaaaaaaaaaaaaaaaaaaaaaaaaaaaaaaaaaaaaaaaaaaaaaaaaaaaaaaaaaaaaaaaaaaaaaaaaaaaaaaaaaaaaaaaaaaaaaaaaaaaaaaaaaaaaaaaaaaaaaaaaaaaaaaaaaaaaaaaaaaaaaaaaaaaaaaaaaaaaaaaaaaaaaaaaaaaaaaaaaaaaaaaaaaaaaaaaaaaaaaaaaaaaaaaaaaaaaaaaaaaaaaaaaaaaaaaaaaaaaaaaaaaaaaaaaaaaaaaaaaaaaaaaaaaaaaaaaaaaaaaaaaaaaaaaaaaaaaaaaaaaaaaaaaaaaaaaaaaaaaaaaaaaaaaaaaaaaaaaaaaaaaaaaaaaaaaaaaaaaaaaaaaaaaaaaaaaaaaaaaaaaaaaaaaaaaaaaaaaaaaaaaaaaaaaaaaaaaaaaaaaaaaaaaaaaaaaaaaaaaaaaaaaaaaaaaaaaaaaaaaaaaaaaaaaaaaaaaaaaaaaaaaaaaaaaaaaaaaaaaaaaaaaaaaaaaaaaaaaaaaaaaaaaaaaaaaaaaaaaaaaaaaaaaaaaaaaaaaaaaaaaaaaaaaaaaaaaaaaaaaaaaaaaaaaaaaaaaaaaaaaaaaaaaaaaaaaaaaaaaaaaaaaaaaaaaaaaaaaaaaaaaaaaaaaaaaaaaaaaaaaaaaaaaaaaaaaaaaaaaaaaaaaaaaaaaaaaaaaaaaaaaaaaaaaaaaaaaaaaaaaaaaaaaaaaaaaaaaaaaaaaaaaaaaaaaaaaaaaaaaaaaaaaaaaaaaaaaaaaaaaaaaaaaaaaaaaaaaaaaaaaaaaaaaaaaaaaaaaaaaaaaaaaaaaaaaaaaaaaaaaaaaaaaaaaaaaaaaaaaaaaaaaaaaaaaaaaaaaaaaaaaaaaaaaaaaaaaaaaaaaaaaaaaaaaaaaaaaaaaaaaaaaaaaaaaaaaaaaaaaaaaaaaaaaaaaaaaaaaaaaaaaaaaaaaaaaaaaaaaaaaaaaaaaaaaaaaaaaaaaaaaaaaaaaaaaaaaaaaaaaaaaaaaaaaaaaaaaaaaaaaaaaaaaa

SEQ ID NO: 35 - DNA, 100 bp, synthetic construct
  misc_feature 1..100: note = source = /note="Description of Artificial Sequence: Synthetic polynucleotide"
  source 1..100: mol_type = other DNA
tttttttttttttttttttttttttttttttttttttttttttttttttttttttttttttttttttttttttttttttttttttttttttttttttttt

SEQ ID NO: 36 - DNA, 5000 bp, synthetic construct
  misc_feature 1..5000: note = /note="This sequence may encompass 50-5000 nucleotides"
  misc_feature 1..5000: note = source = /note="Description of Artificial Sequence: Synthetic polynucleotide"
  misc_feature 1..5000: note = source = /note="See specification as filed for detailed description of substitutions and preferred embodiments"
  source 1..5000: mol_type = other DNA
tttttttttttttttttttttttttttttttttttttttttttttttttttttttttttttttttttttttttttttttttttttttttttttttttttttttttttttttttttttttttttttttttttttttttttttttttttttttttttttttttttttttttttttttttttttttttttttttttttttttttttttttttttttttttttttttttttttttttttttttttttttttttttttttttttttttttttttttttttttttttttttttttttttttttttttttttttttttttttttttttttttttttttttttttttttttttttttttttttttttttttttttttttttttttttttttttttttttttttttttttttttttttttttttttttttttttttttttttttttttttttttttttttttttttttttttttttttttttttttttttttttttttttttttttttttttttttttttttttttttttttttttttttttttttttttttttttttttttttttttttttttttttttttttttttttttttttttttttttttttttttttttttttttttttttttttttttttttttttttttttttttttttttttttttttttttttttttttttttttttttttttttttttttttttttttttttttttttttttttttttttttttttttttttttttttttttttttttttttttttttttttttttttttttttttttttttttttttttttttttttttttttttttttttttttttttttttttttttttttttttttttttttttttttttttttttttttttttttttttttttttttttttttttttttttttttttttttttttttttttttttttttttttttttttttttttttttttttttttttttttttttttttttttttttttttttttttttttttttttttttttttttttttttttttttttttttttttttttttttttttttttttttttttttttttttttttttttttttttttttttttttttttttttttttttttttttttttttttttttttttttttttttttttttttttttttttttttttttttttttttttttttttttttttttttttttttttttttttttttttttttttttttttttttttttttttttttttttttttttttttttttttttttttttttttttttttttttttttttttttttttttttttttttttttttttttttttttttttttttttttttttttttttttttttttttttttttttttttttttttttttttttttttttttttttttttttttttttttttttttttttttttttttttttttttttttttttttttttttttttttttttttttttttttttttttttttttttttttttttttttttttttttttttttttttttttttttttttttttttttttttttttttttttttttttttttttttttttttttttttttttttttttttttttttttttttttttttttttttttttttttttttttttttttttttttttttttttttttttttttttttttttttttttttttttttttttttttttttttttttttttttttttttttttttttttttttttttttttttttttttttttttttttttttttttttttttttttttttttttttttttttttttttttttttttttttttttttttttttttttttttttttttttttttttttttttttttttttttttttttttttttttttttttttttttttttttttttttttttttttttttttttttttttttttttttttttttttttttttttttttttttttttttttttttttttttttttttttttttttttttttttttttttttttttttttttttttttttttttttttttttttttttttttttttttttttttttttttttttttttttttttttttttttttttttttttttttttttttttttttttttttttttttttttttttttttttttttttttttttttttttttttttttttttttttttttttttttttttttttttttttttttttttttttttttttttttttttttttttttttttttttttttttttttttttttttttttttttttttttttttttttttttttttttttttttttttttttttttttttttttttttttttttttttttttttttttttttttttttttttttttttttttttttttttttttttttttttttttttttttttttttttttttttttttttttttttttttttttttttttttttttttttttttttttttttttttttttttttttttttttttttttttttttttttttttttttttttttttttttttttttttttttttttttttttttttttttttttttttttttttttttttttttttttttttttttttttttttttttttttttttttttttttttttttttttttttttttttttttttttttttttttttttttttttttttttttttttttttttttttttttttttttttttttttttttttttttttttttttttttttttttttttttttttttttttttttttttttttttttttttttttttttttttttttttttttttttttttttttttttttttttttttttttttttttttttttttttttttttttttttttttttttttttttttttttttttttttttttttttttttttttttttttttttttttttttttttttttttttttttttttttttttttttttttttttttttttttttttttttttttttttttttttttttttttttttttttttttttttttttttttttttttttttttttttttttttttttttttttttttttttttttttttttttttttttttttttttttttttttttttttttttttttttttttttttttttttttttttttttttttttttttttttttttttttttttttttttttttttttttttttttttttttttttttttttttttttttttttttttttttttttttttttttttttttttttttttttttttttttttttttttttttttttttttttttttttttttttttttttttttttttttttttttttttttttttttttttttttttttttttttttttttttttttttttttttttttttttttttttttttttttttttttttttttttttttttttttttttttttttttttttttttttttttttttttttttttttttttttttttttttttttttttttttttttttttttttttttttttttttttttttttttttttttttttttttttttttttttttttttttttttttttttttttttttttttttttttttttttttttttttttttttttttttttttttttttttttttttttttttttttttttttttttttttttttttttttttttttttttttttttttttttttttttttttttttttttttttttttttttttttttttttttttttttttttttttttttttttttttttttttttttttttttttttttttttttttttttttttttttttttttttttttttttttttttttttttttttttttttttttttttttttttttttttttttttttttttttttttttttttttttttttttttttttttttttttttttttttttttttttttttttttttttttttttttttttttttttttttttttttttttttttttttttttttttttttttttttttttttttttttttttttttttttttttttttttttttttttttttttttttttttttttttttttttttttttttttttttttttttttttttttttttttttttttttttttttttttttttttttttttttttttttttttttttttttttttttttttttttttttttttttttttttttttttttttttttttttttttttttttttttttttttttttttttttttttttttttttttttttttttttttttttttttttttttttttttttttttttttttttttttttttttttttttttttttttttttttttttttttttttttttttttttttttttttttttttttttttttttttttttttttttttttttttttttttttttttttttttttttttttttttttttttttttttttttttttttttttttttttttttttttttttttttttttttttttttttttttttttttttttttttttttttttttttttttttttttttttttttttttttttttttttttttttttttttttttttttttttttttttttttttttttttttttttttttttttttttttttttttttttttttttttttttttttttttttttttttttttttttttttttttttttttttttttttttttttttttttttttttttttttttttttttttttttttttttttttttttttttttttttttttttttttttttttttttttttttttttttttttttttttttttttttttttttttttttttttttttttttttttttttttttttttttttttttttttttttttttttttttttttttttttttttttttttttttttttttttttttttttttttttttttttttttttttttttttttttttttttttttttttttttttttttttttttttttttttttttttttttttttttttttttttttttttttttttttttttttttttttttttttttttttttttttttttttttttttttttttttttttttttttttttttttttttttttttttttttttttttttttt

SEQ ID NO: 37 - DNA, 5000 bp, synthetic construct; identical to SEQ ID NO: 34
  misc_feature 1..5000: note = /note="This sequence may encompass 100-5000 nucleotides"
  misc_feature 1..5000: note = source = /note="Description of Artificial Sequence: Synthetic polynucleotide"
  misc_feature 1..5000: note = source = /note="See specification as filed for detailed description of substitutions and preferred embodiments"
  source 1..5000: mol_type = other DNA

SEQ ID NO: 38 - DNA, 400 bp, synthetic construct
  misc_feature 1..400: note = /note="This sequence may encompass 100-400 nucleotides"
  misc_feature 1..400: note = source = /note="Description of Artificial Sequence: Synthetic polynucleotide"
  misc_feature 1..400: note = source = /note="See specification as filed for detailed description of substitutions and preferred embodiments"
  source 1..400: mol_type = other DNA
aaaaaaaaaaaaaaaaaaaaaaaaaaaaaaaaaaaaaaaaaaaaaaaaaaaaaaaaaaaaaaaaaaaaaaaaaaaaaaaaaaaaaaaaaaaaaaaaaaaaaaaaaaaaaaaaaaaaaaaaaaaaaaaaaaaaaaaaaaaaaaaaaaaaaaaaaaaaaaaaaaaaaaaaaaaaaaaaaaaaaaaaaaaaaaaaaaaaaaaaaaaaaaaaaaaaaaaaaaaaaaaaaaaaaaaaaaaaaaaaaaaaaaaaaaaaaaaaaaaaaaaaaaaaaaaaaaaaaaaaaaaaaaaaaaaaaaaaaaaaaaaaaaaaaaaaaaaaaaaaaaaaaaaaaaaaaaaaaaaaaaaaaaaaaaaaaaaaaaaaaaaaaaaaaaaaaaaaaaaaaaaaaaaaaaaaaaaaaaaa

SEQ ID NO: 39 - protein, 373 aa, synthetic construct
  REGION 1..373: note = source = /note="Description of Artificial Sequence: Synthetic polypeptide"
PGWFLDSPDRPWNPPTFSPALLVVTEGDNATFTCSFSNTSESFVLNWYRMSPSNQTDKLAAFPEDRSQPGQDCRFRVTQLPNGRDFHMSVVRARRNDSGTYLCGAISLAPKAQIKESLRAELRVTERRAEVPTAHPSPSPRPAGQFQTLVTTTPAPRPPTPAPTIASQPLSLRPEACRPAAGGAVHTRGLDFACDIYIWAPLAGTCGVLLLSLVITLYCKRGRKKLLYIFKQPFMRPVQTTQEEDGCSCRFPEEEEGGCELRVKFSRSADAPAYKQGQNQLYNELNLGRREEYDVLDKRRGRDPEMGGKPRRKNPQEGLYNELQKDKMAEAYSEIGMKGERRRGKGHDGLYQGLSTATKDTYDALHMQALPPR

SEQ ID NO: 40-51 - skipped (12 entries)

SEQ ID NO: 52 - protein, 132 aa, synthetic construct
  REGION 1..132: note = source = /note="Description of Artificial Sequence: Synthetic polypeptide"
DVPDYASLGGPSSPKKKRKVSRGVQVETISPGDGRTFPKRGQTCVVHYTGMLEDGKKFDSSRDRNKPFKFMLGKQEVIRGWEEGVAQMSVGQRAKLTISPDYAYGATGHPGIIPPHATLVFDVELLKLETSY

SEQ ID NO: 53 - protein, 108 aa, synthetic construct
  REGION 1..108: note = source = /note="Description of Artificial Sequence: Synthetic polypeptide"
VQVETISPGDGRTFPKRGQTCVVHYTGMLEDGKKFDSSRDRNKPFKFMLGKQEVIRGWEEGVAQMSVGQRAKLTISPDYAYGATGHPGIIPPHATLVFDVELLKLETS

SEQ ID NO: 54 - protein, 93 aa, synthetic construct [sequence omitted]

SEQ ID NO: 55 - protein, 95 aa, synthetic construct
  REGION 1..95: note = source = /note="Description of Artificial Sequence: Synthetic polypeptide"
ILWHEMWHEGLIEASRLYFGERNVKGMFEVLEPLHAMMERGPQTLKETSFNQAYGRDLMEAQEWCRKYMKSGNVKDLTQAWDLYYHVFRRISKTS

SEQ ID NO: 56 - protein, 95 aa, synthetic construct
  REGION 1..95: note = source = /note="Description of Artificial Sequence: Synthetic polypeptide"
ILWHEMWHEGLLEASRLYFGERNVKGMFEVLEPLHAMMERGPQTLKETSFNQAYGRDLMEAQEWCRKYMKSGNVKDLTQAWDLYYHVFRRISKTS

SEQ ID NO: 57 - protein, 95 aa, synthetic construct
  REGION 1..95: note = source = /note="Description of Artificial Sequence: Synthetic polypeptide"
ILWHEMWHEGLEEASRLYFGERNVKGMFEVLEPLHAMMERGPQTLKETSFNQAYGRDLMEAQEWCRKYMKSGNVKDLLQAWDLYYHVFRRISKTS

SEQ ID NO: 58 - protein, 95 aa, synthetic construct
  MOD_RES 12: note = Any amino acid
  MOD_RES 78: note = Any amino acid
  REGION 1..95: note = source = /note="Description of Artificial Sequence: Synthetic polypeptide"
ILWHEMWHEGLXEASRLYFGERNVKGMFEVLEPLHAMMERGPQTLKETSFNQAYGRDLMEAQEWCRKYMKSGNVKDLXQAWDLYYHVFRRISKTS

SEQ ID NO: 59 - protein, 95 aa, synthetic construct
  REGION 1..95: note = source = /note="Description of Artificial Sequence: Synthetic polypeptide"
ILWHEMWHEGLIEASRLYFGERNVKGMFEVLEPLHAMMERGPQTLKETSFNQAYGRDLMEAQEWCRKYMKSGNVKDLLQAWDLYYHVFRRISKTS

SEQ ID NO: 60 - protein, 95 aa, synthetic construct
  REGION 1..95: note = source = /note="Description of Artificial Sequence: Synthetic polypeptide"
ILWHEMWHEGLLEASRLYFGERNVKGMFEVLEPLHAMMERGPQTLKETSFNQAYGRDLMEAQEWCRKYMKSGNVKDLLQAWDLYYHVFRRISKTS

SEQ ID NO: 61 - protein, 1132 aa, Homo sapiens [sequence omitted]

SEQ ID NO: 62 - DNA, 4027 bp, Homo sapiens
  source 1..4027: mol_type = other DNA
caggcagcgtggtcctgctgcgcacgtgggaagccctggccccggccacccccgcgatgccgcgcgctccccgctgccgagccgtgcgctccctgctgcgcagccactaccgcgaggtgctgccgctggccacgttcgtgcggcgcctggggccccagggctggcggctggtgcagcgcggggacccggcggctttccgcgcgctggtggcccagtgcctggtgtgcgtgccctgggacgcacggccgccccccgccgccccctccttccgccaggtgtcctgcctgaaggagctggtggcccgagtgctgcagaggctgtgcgagcgcggcgcgaagaacgtgctggccttcggcttcgcgctgctggacggggcccgcgggggcccccccgaggccttcaccaccagcgtgcgcagctacctgcccaacacggtgaccgacgcactgcgggggagcggggcgtgggggctgctgttgcgccgcgtgggcgacgacgtgctggttcacctgctggcacgctgcgcgctctttgtgctggtggctcccagctgcgcctaccaggtgtgcgggccgccgctgtaccagctcggcgctgccactcaggcccggcccccgccacacgctagtggaccccgaaggcgtctgggatgcgaacgggcctggaaccatagcgtcagggaggccggggtccccctgggcctgccagccccgggtgcgaggaggcgcgggggcagtgccagccgaagtctgccgttgcccaagaggcccaggcgtggcgctgcccctgagccggagcggacgcccgttgggcaggggtcctgggcccacccgggcaggacgcgtggaccgagtgaccgtggtttctgtgtggtgtcacctgccagacccgccgaagaagccacctctttggagggtgcgctctctggcacgcgccactcccacccatccgtgggccgccagcaccacgcgggccccccatccacatcgcggccaccacgtccctgggacacgccttgtcccccggtgtacgccgagaccaagcacttcctctactcctcaggcgacaaggagcagctgcggccctccttcctactcagctctctgaggcccagcctgactggcgctcggaggctcgtggagaccatctttctgggttccaggccctggatgccagggactccccgcaggttgccccgcctgccccagcgctactggcaaatgcggcccctgtttctggagctgcttgggaaccacgcgcagtgcccctacggggtgctcctcaagacgcactgcccgctgcgagctgcggtcaccccagcagccggtgtctgtgcccgggagaagccccagggctctgtggcggcccccgaggaggaggacacagacccccgtcgcctggtgcagctgctccgccagcacagcagcccctggcaggtgtacggcttcgtgcgggcctgcctgcgccggctggtgcccccaggcctctggggctccaggcacaacgaacgccgcttcctcaggaacaccaagaagttcatctccctggggaagcatgccaagctctcgctgcaggagctgacgtggaagatgagcgtgcggggctgcgcttggctgcgcaggagcccaggggttggctgtgttccggccgcagagcaccgtctgcgtgaggagatcctggccaagttcctgcactggctgatgagtgtgtacgtcgtcgagctgctcaggtctttcttttatgtcacggagaccacgtttcaaaagaacaggctctttttctaccggaagagtgtctggagcaagttgcaaagcattggaatcagacagcacttgaagagggtgcagctgcgggagctgtcggaagcagaggtcaggcagcatcgggaagccaggcccgccctgctgacgtccagactccgcttcatccccaagcctgacgggctgcggccgattgtgaacatggactacgtcgtgggagccagaacgttccgcagagaaaagagggccgagcgtctcacctcgagggtgaaggcactgttcagcgtgctcaactacgagcgggcgcggcgccccggcctcctgggcgcctctgtgctgggcctggacgatatccacagggcctggcgcaccttcgtgctgcgtgtgcgggcccaggacccgccgcctgagctgtactttgtcaaggtggatgtgacgggcgcgtacgacaccatcccccaggacaggctcacggaggtcatcgccagcatcatcaaaccccagaacacgtactgcgtgcgtcggtatgccgtggtccagaaggccgcccatgggcacgtccgcaaggccttcaagagccacgtctctaccttgacagacctccagccgtacatgcgacagttcgtggctcacctgcaggagaccagcccgctgagggatgccgtcgtcatcgagcagagctcctccctgaatgaggccagcagtggcctcttcgacgtcttcctacgcttcatgtgccaccacgccgtgcgcatcaggggcaagtcctacgtccagtgccaggggatcccgcagggctccatcctctccacgctgctctgcagcctgtgctacggcgacatggagaacaagctgtttgcggggattcggcgggacgggctgctcctgcgtttggtggatgatttcttgttggtgacacctcacctcacccacgcgaaaaccttcctcaggaccctggtccgaggtgtccctgagtatggctgcgtggtgaacttgcggaagacagtggtgaacttccctgtagaagacgaggccctgggtggcacggcttttgttcagatgccggcccacggcctattcccctggtgcggcctgctgctggatacccggaccctggaggtgcagagcgactactccagctatgcccggacctccatcagagccagtctcaccttcaaccgcggcttcaaggctgggaggaacatgcgtcgcaaactctttggggtcttgcggctgaagtgtcacagcctgtttctggatttgcaggtgaacagcctccagacggtgtgcaccaacatctacaagatcctcctgctgcaggcgtacaggtttcacgcatgtgtgctgcagctcccatttcatcagcaagtttggaagaaccccacatttttcctgcgcgtcatctctgacacggcctccctctgctactccatcctgaaagccaagaacgcagggatgtcgctgggggccaagggcgccgccggccctctgccctccgaggccgtgcagtggctgtgccaccaagcattcctgctcaagctgactcgacaccgtgtcacctacgtgccactcctggggtcactcaggacagcccagacgcagctgagtcggaagctcccggggacgacgctgactgccctggaggccgcagccaacccggcactgccctcagacttcaagaccatcctggactgatggccacccgcccacagccaggccgagagcagacaccagcagccctgtcacgccgggctctacgtcccagggagggaggggcggcccacacccaggcccgcaccgctgggagtctgaggcctgagtgagtgtttggccgaggcctgcatgtccggctgaaggctgagtgtccggctgaggcctgagcgagtgtccagccaagggctgagtgtccagcacacctgccgtcttcacttccccacaggctggcgctcggctccaccccagggccagcttttcctcaccaggagcccggcttccactccccacataggaatagtccatccccagattcgccattgttcacccctcgccctgccctcctttgccttccacccccaccatccaggtggagaccctgagaaggaccctgggagctctgggaatttggagtgaccaaaggtgtgccctgtacacaggcgaggaccctgcacctggatgggggtccctgtgggtcaaattggggggaggtgctgtgggagtaaaatactgaatatatgagtttttcagttttgaaaaaaaaaaaaaaaaaa

SEQ ID NO: 63-77 - skipped (15 entries)

SEQ ID NO: 78 - protein, 30 aa, synthetic construct
  SITE 1..30: note = /note="This sequence may encompass 1-6 'Gly Gly Gly Gly Ser' repeating units"
  REGION 1..30: note = source = /note="Description of Artificial Sequence: Synthetic polypeptide"
  REGION 1..30: note = source = /note="See specification as filed for detailed description of substitutions and preferred embodiments"
GGGGSGGGGSGGGGSGGGGSGGGGSGGGGS

SEQ ID NO: 79-111 - skipped (33 entries)

SEQ ID NO: 112 - protein, 4 aa, synthetic construct
  REGION 1..4: note = source = /note="Description of Artificial Sequence: Synthetic peptide"
RGDS

SEQ ID NO: 113-399 - skipped (287 entries)

SEQ ID NO: 400 - DNA, 1184 bp, synthetic construct
  misc_feature 1..1184: note = source = /note="Description of Artificial Sequence: Synthetic polynucleotide"
  source 1..1184: mol_type = other DNA
cgtgaggctccggtgcccgtcagtgggcagagcgcacatcgcccacagtccccgagaagttggggggaggggtcggcaattgaaccggtgcctagagaaggtggcgcggggtaaactgggaaagtgatgtcgtgtactggctccgcctttttcccgagggtgggggagaaccgtatataagtgcagtagtcgccgtgaacgttctttttcgcaacgggtttgccgccagaacacaggtaagtgccgtgtgtggttcccgcgggcctggcctctttacgggttatggcccttgcgtgccttgaattacttccacctggctgcagtacgtgattcttgatcccgagcttcgggttggaagtgggtgggagagttcgaggccttgcgcttaaggagccccttcgcctcgtgcttgagttgaggcctggcctgggcgctggggccgccgcgtgcgaatctggtggcaccttcgcgcctgtctcgctgctttcgataagtctctagccatttaaaatttttgatgacctgctgcgacgctttttttctggcaagatagtcttgtaaatgcgggccaagatctgcacactggtatttcggtttttggggccgcgggcggcgacggggcccgtgcgtcccagcgcacatgttcggcgaggcggggcctgcgagcgcggccaccgagaatcggacgggggtagtctcaagctggccggcctgctctggtgcctggcctcgcgccgccgtgtatcgccccgccctgggcggcaaggctggcccggtcggcaccagttgcgtgagcggaaagatggccgcttcccggccctgctgcagggagctcaaaatggaggacgcggcgctcgggagagcgggcgggtgagtcacccacacaaaggaaaagggcctttccgtcctcagccgtcgcttcatgtgactccacggagtaccgggcgccgtccaggcacctcgattagttctcgagcttttggagtacgtcgtctttaggttggggggaggggttttatgcgatggagtttccccacactgagtgggtggagactgaagttaggccagcttggcacttgatgtaattctccttggaatttgccctttttgagtttggatcttggttcattctcaagcctcagacagtggttcaaagtttttttcttccatttcaggtgtcgtga

SEQ ID NO: 401 - protein, 21 aa, synthetic construct
  REGION 1..21: note = source = /note="Description of Artificial Sequence: Synthetic peptide"
MALPVTALLLPLALLLHAARP

SEQ ID NO: 402 - DNA, 63 bp, synthetic construct
  misc_feature 1..63: note = source = /note="Description of Artificial Sequence: Synthetic oligonucleotide"
  source 1..63: mol_type = other DNA
atggccctgcctgtgacagccctgctgctgcctctggctctgctgctgcatgccgctagaccc

SEQ ID NO: 403 - protein, 45 aa, synthetic construct
  REGION 1..45: note = source = /note="Description of Artificial Sequence: Synthetic polypeptide"
TTTPAPRPPTPAPTIASQPLSLRPEACRPAAGGAVHTRGLDFACD

SEQ ID NO: 404 - DNA, 135 bp, synthetic construct
  misc_feature 1..135: note = source = /note="Description of Artificial Sequence: Synthetic polynucleotide"
  source 1..135: mol_type = other DNA
accacgacgccagcgccgcgaccaccaacaccggcgcccaccatcgcgtcgcagcccctgtccctgcgcccagaggcgtgccggccagcggcggggggcgcagtgcacacgagggggctggacttcgcctgtgat

SEQ ID NO: 405 - protein, 230 aa, synthetic construct
  REGION 1..230: note = source = /note="Description of Artificial Sequence: Synthetic polypeptide"
ESKYGPPCPPCPAPEFLGGPSVFLFPPKPKDTLMISRTPEVTCVVVDVSQEDPEVQFNWYVDGVEVHNAKTKPREEQFNSTYRVVSVLTVLHQDWLNGKEYKCKVSNKGLPSSIEKTISKAKGQPREPQVYTLPPSQEEMTKNQVSLTCLVKGFYPSDIAVEWESNGQPENNYKTTPPVLDSDGSFFLYSRLTVDKSRWQEGNVFSCSVMHEALHNHYTQKSLSLSLGKM

SEQ ID NO: 406 - DNA, 690 bp, synthetic construct
  misc_feature 1..690: note = source = /note="Description of Artificial Sequence: Synthetic polynucleotide"
  source 1..690: mol_type = other DNA
gagagcaagtacggccctccctgccccccttgccctgcccccgagttcctgggcggacccagcgtgttcctgttcccccccaagcccaaggacaccctgatgatcagccggacccccgaggtgacctgtgtggtggtggacgtgtcccaggaggaccccgaggtccagttcaactggtacgtggacggcgtggaggtgcacaacgccaagaccaagccccgggaggagcagttcaatagcacctaccgggtggtgtccgtgctgaccgtgctgcaccaggactggctgaacggcaaggaatacaagtgtaaggtgtccaacaagggcctgcccagcagcatcgagaaaaccatcagcaaggccaagggccagcctcgggagccccaggtgtacaccctgccccctagccaagaggagatgaccaagaaccaggtgtccctgacctgcctggtgaagggcttctaccccagcgacatcgccgtggagtgggagagcaacggccagcccgagaacaactacaagaccaccccccctgtgctggacagcgacggcagcttcttcctgtacagccggctgaccgtggacaagagccggtggcaggagggcaacgtctttagctgctccgtgatgcacgaggccctgcacaaccactacacccagaagagcctgagcctgtccctgggcaagatg

SEQ ID NO: 407 - protein, 282 aa, synthetic construct
  REGION 1..282: note = source = /note="Description of Artificial Sequence: Synthetic polypeptide"
RWPESPKAQASSVPTAQPQAEGSLAKATTAPATTRNTGRGGEEKKKEKEKEEQEERETKTPECPSHTQPLGVYLLTPAVQDLWLRDKATFTCFVVGSDLKDAHLTWEVAGKVPTGGVEEGLLERHSNGSQSQHSRLTLPRSLWNAGTSVTCTLNHPSLPPQRLMALREPAAQAPVKLSLNLLASSDPPEAASWLLCEVSGFSPPNILLMWLEDQREVNTSGFAPARPPPQPGSTTFWAWSVLRVPAPPSPQPATYTCVVSHEDSRTLLNASRSLEVSYVTDH

SEQ ID NO: 408 - DNA, 847 bp, synthetic construct
  misc_feature 1..847: note = source = /note="Description of Artificial Sequence: Synthetic polynucleotide"
  source 1..847: mol_type = other DNA
aggtggcccgaaagtcccaaggcccaggcatctagtgttcctactgcacagccccaggcagaaggcagcctagccaaagctactactgcacctgccactacgcgcaatactggccgtggcggggaggagaagaaaaaggagaaagagaaagaagaacaggaagagagggagaccaagacccctgaatgtccatcccatacccagccgctgggcgtctatctcttgactcccgcagtacaggacttgtggcttagagataaggccacctttacatgtttcgtcgtgggctctgacctgaaggatgcccatttgacttgggaggttgccggaaaggtacccacagggggggttgaggaagggttgctggagcgccattccaatggctctcagagccagcactcaagactcacccttccgagatccctgtggaacgccgggacctctgtcacatgtactctaaatcatcctagcctgcccccacagcgtctgatggcccttagagagccagccgcccaggcaccagttaagcttagcctgaatctgctcgccagtagtgatcccccagaggccgccagctggctcttatgcgaagtgtccggctttagcccgcccaacatcttgctcatgtggctggaggaccagcgagaagtgaacaccagcggcttcgctccagcccggcccccaccccagccgggttctaccacattctgggcctggagtgtcttaagggtcccagcaccacctagcccccagccagccacatacacctgtgttgtgtcccatgaagatagcaggaccctgctaaatgcttctaggagtctggaggtttcctacgtgactgaccatt

SEQ ID NO: 409-890 - skipped (482 entries)

SEQ ID NO: 891 - protein, 486 aa, synthetic construct
  REGION 1..486: note = source = /note="Description of Artificial Sequence: Synthetic polypeptide"
MALPVTALLLPLALLLHAARPDIQMTQTTSSLSASLGDRVTISCRASQDISKYLNWYQQKPDGTVKLLIYHTSRLHSGVPSRFSGSGSGTDYSLTISNLEQEDIATYFCQQGNTLPYTFGGGTKLEITGGGGSGGGGSGGGGSEVKLQESGPGLVAPSQSLSVTCTVSGVSLPDYGVSWIRQPPRKGLEWLGVIWGSETTYYNSALKSRLTIIKDNSKSQVFLKMNSLQTDDTAIYYCAKHYYYGGSYAMDYWGQGTSVTVSSTTTPAPRPPTPAPTIASQPLSLRPEACRPAAGGAVHTRGLDFACDIYIWAPLAGTCGVLLLSLVITLYCKRGRKKLLYIFKQPFMRPVQTTQEEDGCSCRFPEEEEGGCELRVKFSRSADAPAYKQGQNQLYNELNLGRREEYDVLDKRRGRDPEMGGKPRRKNPQEGLYNELQKDKMAEAYSEIGMKGERRRGKGHDGLYQGLSTATKDTYDALHMQALPPR

SEQ ID NO: 892 - protein, 465 aa, synthetic construct
  REGION 1..465: note = source = /note="Description of Artificial Sequence: Synthetic polypeptide"
DIQMTQTTSSLSASLGDRVTISCRASQDISKYLNWYQQKPDGTVKLLIYHTSRLHSGVPSRFSGSGSGTDYSLTISNLEQEDIATYFCQQGNTLPYTFGGGTKLEITGGGGSGGGGSGGGGSEVKLQESGPGLVAPSQSLSVTCTVSGVSLPDYGVSWIRQPPRKGLEWLGVIWGSETTYYNSALKSRLTIIKDNSKSQVFLKMNSLQTDDTAIYYCAKHYYYGGSYAMDYWGQGTSVTVSSTTTPAPRPPTPAPTIASQPLSLRPEACRPAAGGAVHTRGLDFACDIYIWAPLAGTCGVLLLSLVITLYCKRGRKKLLYIFKQPFMRPVQTTQEEDGCSCRFPEEEEGGCELRVKFSRSADAPAYKQGQNQLYNELNLGRREEYDVLDKRRGRDPEMGGKPRRKNPQEGLYNELQKDKMAEAYSEIGMKGERRRGKGHDGLYQGLSTATKDTYDALHMQALPPR

SEQ ID NO: 893 - protein, 242 aa, synthetic construct
  REGION 1..242: note = source = /note="Description of Artificial Sequence: Synthetic polypeptide"
EIVMTQSPATLSLSPGERATLSCRASQDISKYLNWYQQKPGQAPRLLIYHTSRLHSGIPARFSGSGSGTDYTLTISSLQPEDFAVYFCQQGNTLPYTFGQGTKLEIKGGGGSGGGGSGGGGSQVQLQESGPGLVKPSETLSLTCTVSGVSLPDYGVSWIRQPPGKGLEWIGVIWGSETTYYSSSLKSRVTISKDNSKNQVSLKLSSVTAADTAVYYCAKHYYYGGSYAMDYWGQGTLVTVSS

SEQ ID NO: 894 - DNA, 813 bp, synthetic construct
  misc_feature 1..813: note = source = /note="Description of Artificial Sequence: Synthetic polynucleotide"
  source 1..813: mol_type = other DNA
atggccctccctgtcaccgccctgctgcttccgctggctcttctgctccacgccgctcggcccgaaattgtgatgacccagtcacccgccactcttagcctttcacccggtgagcgcgcaaccctgtcttgcagagcctcccaagacatctcaaaataccttaattggtatcaacagaagcccggacaggctcctcgccttctgatctaccacaccagccggctccattctggaatccctgccaggttcagcggtagcggatctgggaccgactacaccctcactatcagctcactgcagccagaggacttcgctgtctatttctgtcagcaagggaacaccctgccctacacctttggacagggcaccaagctcgagattaaaggtggaggtggcagcggaggaggtgggtccggcggtggaggaagccaggtccaactccaagaaagcggaccgggtcttgtgaagccatcagaaactctttcactgacttgtactgtgagcggagtgtctctccccgattacggggtgtcttggatcagacagccaccggggaagggtctggaatggattggagtgatttggggctctgagactacttactactcttcatccctcaagtcacgcgtcaccatctcaaaggacaactctaagaatcaggtgtcactgaaactgtcatctgtgaccgcagccgacaccgccgtgtactattgcgctaagcattactattatggcgggagctacgcaatggattactggggacagggtactctggtcaccgtgtccagccaccaccatcatcaccatcaccat

SEQ ID NO: 895 - protein, 271 aa, synthetic construct
  REGION 1..271: note = source = /note="Description of Artificial Sequence: Synthetic polypeptide"
MALPVTALLLPLALLLHAARPEIVMTQSPATLSLSPGERATLSCRASQDISKYLNWYQQKPGQAPRLLIYHTSRLHSGIPARFSGSGSGTDYTLTISSLQPEDFAVYFCQQGNTLPYTFGQGTKLEIKGGGGSGGGGSGGGGSQVQLQESGPGLVKPSETLSLTCTVSGVSLPDYGVSWIRQPPGKGLEWIGVIWGSETTYYSSSLKSRVTISKDNSKNQVSLKLSSVTAADTAVYYCAKHYYYGGSYAMDYWGQGTLVTVSSHHHHHHHH

SEQ ID NO: 896 - DNA, 1458 bp, synthetic construct
  misc_feature 1..1458: note = source = /note="Description of Artificial Sequence: Synthetic polynucleotide"
  source 1..1458: mol_type = other DNA
atggccctccctgtcaccgccctgctgcttccgctggctcttctgctccacgccgctcggcccgaaattgtgatgacccagtcacccgccactcttagcctttcacccggtgagcgcgcaaccctgtcttgcagagcctcccaagacatctcaaaataccttaattggtatcaacagaagcccggacaggctcctcgccttctgatctaccacaccagccggctccattctggaatccctgccaggttcagcggtagcggatctgggaccgactacaccctcactatcagctcactgcagccagaggacttcgctgtctatttctgtcagcaagggaacaccctgccctacacctttggacagggcaccaagctcgagattaaaggtggaggtggcagcggaggaggtgggtccggcggtggaggaagccaggtccaactccaagaaagcggaccgggtcttgtgaagccatcagaaactctttcactgacttgtactgtgagcggagtgtctctccccgattacggggtgtcttggatcagacagccaccggggaagggtctggaatggattggagtgatttggggctctgagactacttactactcttcatccctcaagtcacgcgtcaccatctcaaaggacaactctaagaatcaggtgtcactgaaactgtcatctgtgaccgcagccgacaccgccgtgtactattgcgctaagcattactattatggcgggagctacgcaatggattactggggacagggtactctggtcaccgtgtccagcaccactaccccagcaccgaggccacccaccccggctcctaccatcgcctcccagcctctgtccctgcgtccggaggcatgtagacccgcagctggtggggccgtgcatacccggggtcttgacttcgcctgcgatatctacatttgggcccctctggctggtacttgcggggtcctgctgctttcactcgtgatcactctttactgtaagcgcggtcggaagaagctgctgtacatctttaagcaacccttcatgaggcctgtgcagactactcaagaggaggacggctgttcatgccggttcccagaggaggaggaaggcggctgcgaactgcgcgtgaaattcagccgcagcgcagatgctccagcctacaagcaggggcagaaccagctctacaacgaactcaatcttggtcggagagaggagtacgacgtgctggacaagcggagaggacgggacccagaaatgggcgggaagccgcgcagaaagaatccccaagagggcctgtacaacgagctccaaaaggataagatggcagaagcctatagcgagattggtatgaaaggggaacgcagaagaggcaaaggccacgacggactgtaccagggactcagcaccgccaccaaggacacctatgacgctcttcacatgcaggccctgccgcctcgg

SEQ ID NO: 897 - protein, 486 aa, synthetic construct
  REGION 1..486: note = source = /note="Description of Artificial Sequence: Synthetic polypeptide"
MALPVTALLLPLALLLHAARPEIVMTQSPATLSLSPGERATLSCRASQDISKYLNWYQQKPGQAPRLLIYHTSRLHSGIPARFSGSGSGTDYTLTISSLQPEDFAVYFCQQGNTLPYTFGQGTKLEIKGGGGSGGGGSGGGGSQVQLQESGPGLVKPSETLSLTCTVSGVSLPDYGVSWIRQPPGKGLEWIGVIWGSETTYYSSSLKSRVTISKDNSKNQVSLKLSSVTAADTAVYYCAKHYYYGGSYAMDYWGQGTLVTVSSTTTPAPRPPTPAPTIASQPLSLRPEACRPAAGGAVHTRGLDFACDIYIWAPLAGTCGVLLLSLVITLYCKRGRKKLLYIFKQPFMRPVQTTQEEDGCSCRFPEEEEGGCELRVKFSRSADAPAYKQGQNQLYNELNLGRREEYDVLDKRRGRDPEMGGKPRRKNPQEGLYNELQKDKMAEAYSEIGMKGERRRGKGHDGLYQGLSTATKDTYDALHMQALPPR

SEQ ID NO: 898 - protein, 242 aa, synthetic construct
  REGION 1..242: note = source = /note="Description of Artificial Sequence: Synthetic polypeptide"
EIVMTQSPATLSLSPGERATLSCRASQDISKYLNWYQQKPGQAPRLLIYHTSRLHSGIPARFSGSGSGTDYTLTISSLQPEDFAVYFCQQGNTLPYTFGQGTKLEIKGGGGSGGGGSGGGGSQVQLQESGPGLVKPSETLSLTCTVSGVSLPDYGVSWIRQPPGKGLEWIGVIWGSETTYYQSSLKSRVTISKDNSKNQVSLKLSSVTAADTAVYYCAKHYYYGGSYAMDYWGQGTLVTVSS

SEQ ID NO: 899 - DNA, 813 bp, synthetic construct
  misc_feature 1..813: note = source = /note="Description of Artificial Sequence: Synthetic polynucleotide"
  source 1..813: mol_type = other DNA
atggccctccctgtcaccgccctgctgcttccgctggctcttctgctccacgccgctcggcccgaaattgtgatgacccagtcacccgccactcttagcctttcacccggtgagcgcgcaaccctgtcttgcagagcctcccaagacatctcaaaataccttaattggtatcaacagaagcccggacaggctcctcgccttctgatctaccacaccagccggctccattctggaatccctgccaggttcagcggtagcggatctgggaccgactacaccctcactatcagctcactgcagccagaggacttcgctgtctatttctgtcagcaagggaacaccctgccctacacctttggacagggcaccaagctcgagattaaaggtggaggtggcagcggaggaggtgggtccggcggtggaggaagccaggtccaactccaagaaagcggaccgggtcttgtgaagccatcagaaactctttcactgacttgtactgtgagcggagtgtctctccccgattacggggtgtcttggatcagacagccaccggggaagggtctggaatggattggagtgatttggggctctgagactacttactaccaatcatccctcaagtcacgcgtcaccatctcaaaggacaactctaagaatcaggtgtcactgaaactgtcatctgtgaccgcagccgacaccgccgtgtactattgcgctaagcattactattatggcgggagctacgcaatggattactggggacagggtactctggtcaccgtgtccagccaccaccatcatcaccatcaccat

SEQ ID NO: 900 - protein, 271 aa, synthetic construct
  REGION 1..271: note = source = /note="Description of Artificial Sequence: Synthetic polypeptide"
MALPVTALLLPLALLLHAARPEIVMTQSPATLSLSPGERATLSCRASQDISKYLNWYQQKPGQAPRLLIYHTSRLHSGIPARFSGSGSGTDYTLTISSLQPEDFAVYFCQQGNTLPYTFGQGTKLEIKGGGGSGGGGSGGGGSQVQLQESGPGLVKPSETLSLTCTVSGVSLPDYGVSWIRQPPGKGLEWIGVIWGSETTYYQSSLKSRVTISKDNSKNQVSLKLSSVTAADTAVYYCAKHYYYGGSYAMDYWGQGTLVTVSSHHHHHHHH

SEQ ID NO: 901 - DNA, 1458 bp, synthetic construct
  misc_feature 1..1458: note = source = /note="Description of Artificial Sequence: Synthetic polynucleotide"
  source 1..1458: mol_type = other DNA
atggccctccctgtcaccgccctgctgcttccgctggctcttctgctccacgccgctcggcccgaaattgtgatgacccagtcacccgccactcttagcctttcacccggtgagcgcgcaaccctgtcttgcagagcctcccaagacatctcaaaataccttaattggtatcaacagaagcccggacaggctcctcgccttctgatctaccacaccagccggctccattctggaatccctgccaggttcagcggtagcggatctgggaccgactacaccctcactatcagctcactgcagccagaggacttcgctgtctatttctgtcagcaagggaacaccctgccctacacctttggacagggcaccaagctcgagattaaaggtggaggtggcagcggaggaggtgggtccggcggtggaggaagccaggtccaactccaagaaagcggaccgggtcttgtgaagccatcagaaactctttcactgacttgtactgtgagcggagtgtctctccccgattacggggtgtcttggatcagacagccaccggggaagggtctggaatggattggagtgatttggggctctgagactacttactaccaatcatccctcaagtcacgcgtcaccatctcaaaggacaactctaagaatcaggtgtcactgaaactgtcatctgtgaccgcagccgacaccgccgtgtactattgcgctaagcattactattatggcgggagctacgcaatggattactggggacagggtactctggtcaccgtgtccagcaccactaccccagcaccgaggccacccaccccggctcctaccatcgcctcccagcctctgtccctgcgtccggaggcatgtagacccgcagctggtggggccgtgcatacccggggtcttgacttcgcctgcgatatctacatttgggcccctctggctggtacttgcggggtcctgctgctttcactcgtgatcactctttactgtaagcgcggtcggaagaagctgctgtacatctttaagcaacccttcatgaggcctgtgcagactactcaagaggaggacggctgttcatgccggttcccagaggaggaggaaggcggctgcgaactgcgcgtgaaattcagccgcagcgcagatgctccagcctacaagcaggggcagaaccagctctacaacgaactcaatcttggtcggagagaggagtacgacgtgctggacaagcggagaggacgggacccagaaatgggcgggaagccgcgcagaaagaatccccaagagggcctgtacaacgagctccaaaaggataagatggcagaagcctatagcgagattggtatgaaaggggaacgcagaagaggcaaaggccacgacggactgtaccagggactcagcaccgccaccaaggacacctatgacgctcttcacatgcaggccctgccgcctcgg

SEQ ID NO: 902 - protein, 486 aa, synthetic construct
  REGION 1..486: note = source = /note="Description of Artificial Sequence: Synthetic polypeptide"
MALPVTALLLPLALLLHAARPEIVMTQSPATLSLSPGERATLSCRASQDISKYLNWYQQKPGQAPRLLIYHTSRLHSGIPARFSGSGSGTDYTLTISSLQPEDFAVYFCQQGNTLPYTFGQGTKLEIKGGGGSGGGGSGGGGSQVQLQESGPGLVKPSETLSLTCTVSGVSLPDYGVSWIRQPPGKGLEWIGVIWGSETTYYQSSLKSRVTISKDNSKNQVSLKLSSVTAADTAVYYCAKHYYYGGSYAMDYWGQGTLVTVSSTTTPAPRPPTPAPTIASQPLSLRPEACRPAAGGAVHTRGLDFACDIYIWAPLAGTCGVLLLSLVITLYCKRGRKKLLYIFKQPFMRPVQTTQEEDGCSCRFPEEEEGGCELRVKFSRSADAPAYKQGQNQLYNELNLGRREEYDVLDKRRGRDPEMGGKPRRKNPQEGLYNELQKDKMAEAYSEIGMKGERRRGKGHDGLYQGLSTATKDTYDALHMQALPPR

SEQ ID NO: 903 - protein, 242 aa, synthetic construct
  REGION 1..242: note = source = /note="Description of Artificial Sequence: Synthetic polypeptide"
QVQLQESGPGLVKPSETLSLTCTVSGVSLPDYGVSWIRQPPGKGLEWIGVIWGSETTYYSSSLKSRVTISKDNSKNQVSLKLSSVTAADTAVYYCAKHYYYGGSYAMDYWGQGTLVTVSSGGGGSGGGGSGGGGSEIVMTQSPATLSLSPGERATLSCRASQDISKYLNWYQQKPGQAPRLLIYHTSRLHSGIPARFSGSGSGTDYTLTISSLQPEDFAVYFCQQGNTLPYTFGQGTKLEIK

SEQ ID NO: 904 - DNA, 813 bp, synthetic construct
  misc_feature 1..813: note = source = /note="Description of Artificial Sequence: Synthetic polynucleotide"
  source 1..813: mol_type = other DNA
atggctctgcccgtgaccgcactcctcctgccactggctctgctgcttcacgccgctcgcccacaagtccagcttcaagaatcagggcctggtctggtgaagccatctgagactctgtccctcacttgcaccgtgagcggagtgtccctcccagactacggagtgagctggattagacagcctcccggaaagggactggagtggatcggagtgatttggggtagcgaaaccacttactattcatcttccctgaagtcacgggtcaccatttcaaaggataactcaaagaatcaagtgagcctcaagctctcatcagtcaccgccgctgacaccgccgtgtattactgtgccaagcattactactatggagggtcctacgccatggactactggggccagggaactctggtcactgtgtcatctggtggaggaggtagcggaggaggcgggagcggtggaggtggctccgaaatcgtgatgacccagagccctgcaaccctgtccctttctcccggggaacgggctaccctttcttgtcgggcatcacaagatatctcaaaatacctcaattggtatcaacagaagccgggacaggcccctaggcttcttatctaccacacctctcgcctgcatagcgggattcccgcacgctttagcgggtctggaagcgggaccgactacactctgaccatctcatctctccagcccgaggacttcgccgtctacttctgccagcagggtaacaccctgccgtacaccttcggccagggcaccaagcttgagatcaaacatcaccaccatcatcaccatcac

SEQ ID NO: 905 - protein, 271 aa, synthetic construct
  REGION 1..271: note = source = /note="Description of Artificial Sequence: Synthetic polypeptide"
MALPVTALLLPLALLLHAARPQVQLQESGPGLVKPSETLSLTCTVSGVSLPDYGVSWIRQPPGKGLEWIGVIWGSETTYYSSSLKSRVTISKDNSKNQVSLKLSSVTAADTAVYYCAKHYYYGGSYAMDYWGQGTLVTVSSGGGGSGGGGSGGGGSEIVMTQSPATLSLSPGERATLSCRASQDISKYLNWYQQKPGQAPRLLIYHTSRLHSGIPARFSGSGSGTDYTLTISSLQPEDFAVYFCQQGNTLPYTFGQGTKLEIKHHHHHHHH

SEQ ID NO: 906 - DNA, 1458 bp, synthetic construct
  misc_feature 1..1458: note = source = /note="Description of Artificial Sequence: Synthetic polynucleotide"
  source 1..1458: mol_type = other DNA
atggctctgcccgtgaccgcactcctcctgccactggctctgctgcttcacgccgctcgcccacaagtccagcttcaagaatcagggcctggtctggtgaagccatctgagactctgtccctcacttgcaccgtgagcggagtgtccctcccagactacggagtgagctggattagacagcctcccggaaagggactggagtggatcggagtgatttggggtagcgaaaccacttactattcatcttccctgaagtcacgggtcaccatttcaaaggataactcaaagaatcaagtgagcctcaagctctcatcagtcaccgccgctgacaccgccgtgtattactgtgccaagcattactactatggagggtcctacgccatggactactggggccagggaactctggtcactgtgtcatctggtggaggaggtagcggaggaggcgggagcggtggaggtggctccgaaatcgtgatgacccagagccctgcaaccctgtccctttctcccggggaacgggctaccctttcttgtcgggcatcacaagatatctcaaaatacctcaattggtatcaacagaagccgggacaggcccctaggcttcttatctaccacacctctcgcctgcatagcgggattcccgcacgctttagcgggtctggaagcgggaccgactacactctgaccatctcatctctccagcccgaggacttcgccgtctacttctgccagcagggtaacaccctgccgtacaccttcggccagggcaccaagcttgagatcaaaaccactactcccgctccaaggccacccacccctgccccgaccatcgcctctcagccgctttccctgcgtccggaggcatgtagacccgcagctggtggggccgtgcatacccggggtcttgacttcgcctgcgatatctacatttgggcccctctggctggtacttgcggggtcctgctgctttcactcgtgatcactctttactgtaagcgcggtcggaagaagctgctgtacatctttaagcaacccttcatgaggcctgtgcagactactcaagaggaggacggctgttcatgccggttcccagaggaggaggaaggcggctgcgaactgcgcgtgaaattcagccgcagcgcagatgctccagcctacaagcaggggcagaaccagctctacaacgaactcaatcttggtcggagagaggagtacgacgtgctggacaagcggagaggacgggacccagaaatgggcgggaagccgcgcagaaagaatccccaagagggcctgtacaacgagctccaaaaggataagatggcagaagcctatagcgagattggtatgaaaggggaacgcagaagaggcaaaggccacgacggactgtaccagggactcagcaccgccaccaaggacacctatgacgctcttcacatgcaggccctgccgcctcgg

SEQ ID NO: 907 - protein, 486 aa, synthetic construct
  REGION 1..486: note = source = /note="Description of Artificial Sequence: Synthetic polypeptide"
MALPVTALLLPLALLLHAARPQVQLQESGPGLVKPSETLSLTCTVSGVSLPDYGVSWIRQPPGKGLEWIGVIWGSETTYYSSSLKSRVTISKDNSKNQVSLKLSSVTAADTAVYYCAKHYYYGGSYAMDYWGQGTLVTVSSGGGGSGGGGSGGGGSEIVMTQSPATLSLSPGERATLSCRASQDISKYLNWYQQKPGQAPRLLIYHTSRLHSGIPARFSGSGSGTDYTLTISSLQPEDFAVYFCQQGNTLPYTFGQGTKLEIKTTTPAPRPPTPAPTIASQPLSLRPEACRPAAGGAVHTRGLDFACDIYIWAPLAGTCGVLLLSLVITLYCKRGRKKLLYIFKQPFMRPVQTTQEEDGCSCRFPEEEEGGCELRVKFSRSADAPAYKQGQNQLYNELNLGRREEYDVLDKRRGRDPEMGGKPRRKNPQEGLYNELQKDKMAEAYSEIGMKGERRRGKGHDGLYQGLSTATKDTYDALHMQALPPR

SEQ ID NO: 908 - protein, 242 aa, synthetic construct
  REGION 1..242: note = source = /note="Description of Artificial Sequence: Synthetic polypeptide"
QVQLQESGPGLVKPSETLSLTCTVSGVSLPDYGVSWIRQPPGKGLEWIGVIWGSETTYYQSSLKSRVTISKDNSKNQVSLKLSSVTAADTAVYYCAKHYYYGGSYAMDYWGQGTLVTVSSGGGGSGGGGSGGGGSEIVMTQSPATLSLSPGERATLSCRASQDISKYLNWYQQKPGQAPRLLIYHTSRLHSGIPARFSGSGSGTDYTLTISSLQPEDFAVYFCQQGNTLPYTFGQGTKLEIK

SEQ ID NO: 909 - DNA, 813 bp, synthetic construct
  misc_feature 1..813: note = source = /note="Description of Artificial Sequence: Synthetic polynucleotide"
  source 1..813: mol_type = other DNA
atggctctgcccgtgaccgcactcctcctgccactggctctgctgcttcacgccgctcgcccacaagtccagcttcaagaatcagggcctggtctggtgaagccatctgagactctgtccctcacttgcaccgtgagcggagtgtccctcccagactacggagtgagctggattagacagcctcccggaaagggactggagtggatcggagtgatttggggtagcgaaaccacttactatcaatcttccctgaagtcacgggtcaccatttcaaaggataactcaaagaatcaagtgagcctcaagctctcatcagtcaccgccgctgacaccgccgtgtattactgtgccaagcattactactatggagggtcctacgccatggactactggggccagggaactctggtcactgtgtcatctggtggaggaggtagcggaggaggcgggagcggtggaggtggctccgaaatcgtgatgacccagagccctgcaaccctgtccctttctcccggggaacgggctaccctttcttgtcgggcatcacaagatatctcaaaatacctcaattggtatcaacagaagccgggacaggcccctaggcttcttatctaccacacctctcgcctgcatagcgggattcccgcacgctttagcgggtctggaagcgggaccgactacactctgaccatctcatctctccagcccgaggacttcgccgtctacttctgccagcagggtaacaccctgccgtacaccttcggccagggcaccaagcttgagatcaaacatcaccaccatcatcaccatcac

SEQ ID NO: 910 - protein, 271 aa, synthetic construct
  REGION 1..271: note = source = /note="Description of Artificial Sequence: Synthetic polypeptide"
MALPVTALLLPLALLLHAARPQVQLQESGPGLVKPSETLSLTCTVSGVSLPDYGVSWIRQPPGKGLEWIGVIWGSETTYYQSSLKSRVTISKDNSKNQVSLKLSSVTAADTAVYYCAKHYYYGGSYAMDYWGQGTLVTVSSGGGGSGGGGSGGGGSEIVMTQSPATLSLSPGERATLSCRASQDISKYLNWYQQKPGQAPRLLIYHTSRLHSGIPARFSGSGSGTDYTLTISSLQPEDFAVYFCQQGNTLPYTFGQGTKLEIKHHHHHHHH

SEQ ID NO: 911 - DNA, 1458 bp, synthetic construct
  misc_feature 1..1458: note = source = /note="Description of Artificial Sequence: Synthetic polynucleotide"
  source 1..1458: mol_type = other DNA
atggctctgcccgtgaccgcactcctcctgccactggctctgctgcttcacgccgctcgcccacaagtccagcttcaagaatcagggcctggtctggtgaagccatctgagactctgtccctcacttgcaccgtgagcggagtgtccctcccagactacggagtgagctggattagacagcctcccggaaagggactggagtggatcggagtgatttggggtagcgaaaccacttactatcaatcttccctgaagtcacgggtcaccatttcaaaggataactcaaagaatcaagtgagcctcaagctctcatcagtcaccgccgctgacaccgccgtgtattactgtgccaagcattactactatggagggtcctacgccatggactactggggccagggaactctggtcactgtgtcatctggtggaggaggtagcggaggaggcgggagcggtggaggtggctccgaaatcgtgatgacccagagccctgcaaccctgtccctttctcccggggaacgggctaccctttcttgtcgggcatcacaagatatctcaaaatacctcaattggtatcaacagaagccgggacaggcccctaggcttcttatctaccacacctctcgcctgcatagcgggattcccgcacgctttagcgggtctggaagcgggaccgactacactctgaccatctcatctctccagcccgaggacttcgccgtctacttctgccagcagggtaacaccctgccgtacaccttcggccagggcaccaagcttgagatcaaaaccactactcccgctccaaggccacccacccctgccccgaccatcgcctctcagccgctttccctgcgtccggaggcatgtagacccgcagctggtggggccgtgcatacccggggtcttgacttcgcctgcgatatctacatttgggcccctctggctggtacttgcggggtcctgctgctttcactcgtgatcactctttactgtaagcgcggtcggaagaagctgctgtacatctttaagcaacccttcatgaggcctgtgcagactactcaagaggaggacggctgttcatgccggttcccagaggaggaggaaggcggctgcgaactgcgcgtgaaattcagccgcagcgcagatgctccagcctacaagcaggggcagaaccagctctacaacgaactcaatcttggtcggagagaggagtacgacgtgctggacaagcggagaggacgggacccagaaatgggcgggaagccgcgcagaaagaatccccaagagggcctgtacaacgagctccaaaaggataagatggcagaagcctatagcgagattggtatgaaaggggaacgcagaagaggcaaaggccacgacggactgtaccagggactcagcaccgccaccaaggacacctatgacgctcttcacatgcaggccctgccgcctcgg

SEQ ID NO: 912 - protein, 486 aa, synthetic construct
  REGION 1..486: note = source = /note="Description of Artificial Sequence: Synthetic polypeptide"
MALPVTALLLPLALLLHAARPQVQLQESGPGLVKPSETLSLTCTVSGVSLPDYGVSWIRQPPGKGLEWIGVIWGSETTYYQSSLKSRVTISKDNSKNQVSLKLSSVTAADTAVYYCAKHYYYGGSYAMDYWGQGTLVTVSSGGGGSGGGGSGGGGSEIVMTQSPATLSLSPGERATLSCRASQDISKYLNWYQQKPGQAPRLLIYHTSRLHSGIPARFSGSGSGTDYTLTISSLQPEDFAVYFCQQGNTLPYTFGQGTKLEIKTTTPAPRPPTPAPTIASQPLSLRPEACRPAAGGAVHTRGLDFACDIYIWAPLAGTCGVLLLSLVITLYCKRGRKKLLYIFKQPFMRPVQTTQEEDGCSCRFPEEEEGGCELRVKFSRSADAPAYKQGQNQLYNELNLGRREEYDVLDKRRGRDPEMGGKPRRKNPQEGLYNELQKDKMAEAYSEIGMKGERRRGKGHDGLYQGLSTATKDTYDALHMQALPPR

SEQ ID NO: 913 - protein, 247 aa, synthetic construct
  REGION 1..247: note = source = /note="Description of Artificial Sequence: Synthetic polypeptide"
EIVMTQSPATLSLSPGERATLSCRASQDISKYLNWYQQKPGQAPRLLIYHTSRLHSGIPARFSGSGSGTDYTLTISSLQPEDFAVYFCQQGNTLPYTFGQGTKLEIKGGGGSGGGGSGGGGSGGGGSQVQLQESGPGLVKPSETLSLTCTVSGVSLPDYGVSWIRQPPGKGLEWIGVIWGSETTYYSSSLKSRVTISKDNSKNQVSLKLSSVTAADTAVYYCAKHYYYGGSYAMDYWGQGTLVTVSS

SEQ ID NO: 914 - DNA, 828 bp, synthetic construct
  misc_feature 1..828: note = source = /note="Description of Artificial Sequence: Synthetic polynucleotide"
  source 1..828: mol_type = other DNA
atggccctcccagtgaccgctctgctgctgcctctcgcacttcttctccatgccgctcggcctgagatcgtcatgacccaaagccccgctaccctgtccctgtcacccggcgagagggcaaccctttcatgcagggccagccaggacatttctaagtacctcaactggtatcagcagaagccagggcaggctcctcgcctgctgatctaccacaccagccgcctccacagcggtatccccgccagattttccgggagcgggtctggaaccgactacaccctcaccatctcttctctgcagcccgaggatttcgccgtctatttctgccagcaggggaatactctgccgtacaccttcggtcaaggtaccaagctggaaatcaagggaggcggaggatcaggcggtggcggaagcggaggaggtggctccggaggaggaggttcccaagtgcagcttcaagaatcaggacccggacttgtgaagccatcagaaaccctctccctgacttgtaccgtgtccggtgtgagcctccccgactacggagtctcttggattcgccagcctccggggaagggtcttgaatggattggggtgatttggggatcagagactacttactactcttcatcacttaagtcacgggtcaccatcagcaaagataatagcaagaaccaagtgtcacttaagctgtcatctgtgaccgccgctgacaccgccgtgtactattgtgccaaacattactattacggagggtcttatgctatggactactggggacaggggaccctggtgactgtctctagccatcaccatcaccaccatcatcac

SEQ ID NO: 915 - protein, 276 aa, synthetic construct
  REGION 1..276: note = source = /note="Description of Artificial Sequence: Synthetic polypeptide"
MALPVTALLLPLALLLHAARPEIVMTQSPATLSLSPGERATLSCRASQDISKYLNWYQQKPGQAPRLLIYHTSRLHSGIPARFSGSGSGTDYTLTISSLQPEDFAVYFCQQGNTLPYTFGQGTKLEIKGGGGSGGGGSGGGGSGGGGSQVQLQESGPGLVKPSETLSLTCTVSGVSLPDYGVSWIRQPPGKGLEWIGVIWGSETTYYSSSLKSRVTISKDNSKNQVSLKLSSVTAADTAVYYCAKHYYYGGSYAMDYWGQGTLVTVSSHHHHHHHH

SEQ ID NO: 916 - DNA, 1473 bp, synthetic construct
  misc_feature 1..1473: note = source = /note="Description of Artificial Sequence: Synthetic polynucleotide"
  source 1..1473: mol_type = other DNA
atggccctccctgtcaccgccctgctgcttccgctggctcttctgctccacgccgctcggcccgaaattgtgatgacccagtcacccgccactcttagcctttcacccggtgagcgcgcaaccctgtcttgcagagcctcccaagacatctcaaaataccttaattggtatcaacagaagcccggacaggctcctcgccttctgatctaccacaccagccggctccattctggaatccctgccaggttcagcggtagcggatctgggaccgactacaccctcactatcagctcactgcagccagaggacttcgctgtctatttctgtcagcaagggaacaccctgccctacacctttggacagggcaccaagctcgagattaaaggtggaggtggcagcggaggaggtgggtccggcggtggaggaagcggcggaggcgggagccaggtccaactccaagaaagcggaccgggtcttgtgaagccatcagaaactctttcactgacttgtactgtgagcggagtgtctctccccgattacggggtgtcttggatcagacagccaccggggaagggtctggaatggattggagtgatttggggctctgagactacttactactcttcatccctcaagtcacgcgtcaccatctcaaaggacaactctaagaatcaggtgtcactgaaactgtcatctgtgaccgcagccgacaccgccgtgtactattgcgctaagcattactattatggcgggagctacgcaatggattactggggacagggtactctggtcaccgtgtccagcaccactaccccagcaccgaggccacccaccccggctcctaccatcgcctcccagcctctgtccctgcgtccggaggcatgtagacccgcagctggtggggccgtgcatacccggggtcttgacttcgcctgcgatatctacatttgggcccctctggctggtacttgcggggtcctgctgctttcactcgtgatcactctttactgtaagcgcggtcggaagaagctgctgtacatctttaagcaacccttcatgaggcctgtgcagactactcaagaggaggacggctgttcatgccggttcccagaggaggaggaaggcggctgcgaactgcgcgtgaaattcagccgcagcgcagatgctccagcctacaagcaggggcagaaccagctctacaacgaactcaatcttggtcggagagaggagtacgacgtgctggacaagcggagaggacgggacccagaaatgggcgggaagccgcgcagaaagaatccccaagagggcctgtacaacgagctccaaaaggataagatggcagaagcctatagcgagattggtatgaaaggggaacgcagaagaggcaaaggccacgacggactgtaccagggactcagcaccgccaccaaggacacctatgacgctcttcacatgcaggccctgccgcctcgg

SEQ ID NO: 917 - protein, 491 aa, synthetic construct
  REGION 1..491: note = source = /note="Description of Artificial Sequence: Synthetic polypeptide"
MALPVTALLLPLALLLHAARPEIVMTQSPATLSLSPGERATLSCRASQDISKYLNWYQQKPGQAPRLLIYHTSRLHSGIPARFSGSGSGTDYTLTISSLQPEDFAVYFCQQGNTLPYTFGQGTKLEIKGGGGSGGGGSGGGGSGGGGSQVQLQESGPGLVKPSETLSLTCTVSGVSLPDYGVSWIRQPPGKGLEWIGVIWGSETTYYSSSLKSRVTISKDNSKNQVSLKLSSVTAADTAVYYCAKHYYYGGSYAMDYWGQGTLVTVSSTTTPAPRPPTPAPTIASQPLSLRPEACRPAAGGAVHTRGLDFACDIYIWAPLAGTCGVLLLSLVITLYCKRGRKKLLYIFKQPFMRPVQTTQEEDGCSCRFPEEEEGGCELRVKFSRSADAPAYKQGQNQLYNELNLGRREEYDVLDKRRGRDPEMGGKPRRKNPQEGLYNELQKDKMAEAYSEIGMKGERRRGKGHDGLYQGLSTATKDTYDALHMQALPPR

SEQ ID NO: 918 - protein, 247 aa, synthetic construct
  REGION 1..247: note = source = /note="Description of Artificial Sequence: Synthetic polypeptide"
EIVMTQSPATLSLSPGERATLSCRASQDISKYLNWYQQKPGQAPRLLIYHTSRLHSGIPARFSGSGSGTDYTLTISSLQPEDFAVYFCQQGNTLPYTFGQGTKLEIKGGGGSGGGGSGGGGSGGGGSQVQLQESGPGLVKPSETLSLTCTVSGVSLPDYGVSWIRQPPGKGLEWIGVIWGSETTYYQSSLKSRVTISKDNSKNQVSLKLSSVTAADTAVYYCAKHYYYGGSYAMDYWGQGTLVTVSS

SEQ ID NO: 919 - DNA, 828 bp, synthetic construct
  misc_feature 1..828: note = source = /note="Description of Artificial Sequence: Synthetic polynucleotide"
  source 1..828: mol_type = other DNA
atggccctcccagtgaccgctctgctgctgcctctcgcacttcttctccatgccgctcggcctgagatcgtcatgacccaaagccccgctaccctgtccctgtcacccggcgagagggcaaccctttcatgcagggccagccaggacatttctaagtacctcaactggtatcagcagaagccagggcaggctcctcgcctgctgatctaccacaccagccgcctccacagcggtatccccgccagattttccgggagcgggtctggaaccgactacaccctcaccatctcttctctgcagcccgaggatttcgccgtctatttctgccagcaggggaatactctgccgtacaccttcggtcaaggtaccaagctggaaatcaagggaggcggaggatcaggcggtggcggaagcggaggaggtggctccggaggaggaggttcccaagtgcagcttcaagaatcaggacccggacttgtgaagccatcagaaaccctctccctgacttgtaccgtgtccggtgtgagcctccccgactacggagtctcttggattcgccagcctccggggaagggtcttgaatggattggggtgatttggggatcagagactacttactaccagtcatcacttaagtcacgggtcaccatcagcaaagataatagcaagaaccaagtgtcacttaagctgtcatctgtgaccgccgctgacaccgccgtgtactattgtgccaaacattactattacggagggtcttatgctatggactactggggacaggggaccctggtgactgtctctagccatcaccatcaccaccatcatcac

SEQ ID NO: 920 - protein, 276 aa, synthetic construct
  REGION 1..276: note = source = /note="Description of Artificial Sequence: Synthetic polypeptide"
MALPVTALLLPLALLLHAARPEIVMTQSPATLSLSPGERATLSCRASQDISKYLNWYQQKPGQAPRLLIYHTSRLHSGIPARFSGSGSGTDYTLTISSLQPEDFAVYFCQQGNTLPYTFGQGTKLEIKGGGGSGGGGSGGGGSGGGGSQVQLQESGPGLVKPSETLSLTCTVSGVSLPDYGVSWIRQPPGKGLEWIGVIWGSETTYYQSSLKSRVTISKDNSKNQVSLKLSSVTAADTAVYYCAKHYYYGGSYAMDYWGQGTLVTVSSHHHHHHHH

SEQ ID NO: 921 - DNA, 1473 bp, synthetic construct
  misc_feature 1..1473: note = source = /note="Description of Artificial Sequence: Synthetic polynucleotide"
  source 1..1473: mol_type = other DNA
atggccctccctgtcaccgccctgctgcttccgctggctcttctgctccacgccgctcggcccgaaattgtgatgacccagtcacccgccactcttagcctttcacccggtgagcgcgcaaccctgtcttgcagagcctcccaagacatctcaaaataccttaattggtatcaacagaagcccggacaggctcctcgccttctgatctaccacaccagccggctccattctggaatccctgccaggttcagcggtagcggatctgggaccgactacaccctcactatcagctcactgcagccagaggacttcgctgtctatttctgtcagcaagggaacaccctgccctacacctttggacagggcaccaagctcgagattaaaggtggaggtggcagcggaggaggtgggtccggcggtggaggaagcggaggcggagggagccaggtccaactccaagaaagcggaccgggtcttgtgaagccatcagaaactctttcactgacttgtactgtgagcggagtgtctctccccgattacggggtgtcttggatcagacagccaccggggaagggtctggaatggattggagtgatttggggctctgagactacttactaccaatcatccctcaagtcacgcgtcaccatctcaaaggacaactctaagaatcaggtgtcactgaaactgtcatctgtgaccgcagccgacaccgccgtgtactattgcgctaagcattactattatggcgggagctacgcaatggattactggggacagggtactctggtcaccgtgtccagcaccactaccccagcaccgaggccacccaccccggctcctaccatcgcctcccagcctctgtccctgcgtccggaggcatgtagacccgcagctggtggggccgtgcatacccggggtcttgacttcgcctgcgatatctacatttgggcccctctggctggtacttgcggggtcctgctgctttcactcgtgatcactctttactgtaagcgcggtcggaagaagctgctgtacatctttaagcaacccttcatgaggcctgtgcagactactcaagaggaggacggctgttcatgccggttcccagaggaggaggaaggcggctgcgaactgcgcgtgaaattcagccgcagcgcagatgctccagcctacaagcaggggcagaaccagctctacaacgaactcaatcttggtcggagagaggagtacgacgtgctggacaagcggagaggacgggacccagaaatgggcgggaagccgcgcagaaagaatccccaagagggcctgtacaacgagctccaaaaggataagatggcagaagcctatagcgagattggtatgaaaggggaacgcagaagaggcaaaggccacgacggactgtaccagggactcagcaccgccaccaaggacacctatgacgctcttcacatgcaggccctgccgcctcgg

SEQ ID NO: 922 - protein, 491 aa, synthetic construct
  REGION 1..491: note = source = /note="Description of Artificial Sequence: Synthetic polypeptide"
MALPVTALLLPLALLLHAARPEIVMTQSPATLSLSPGERATLSCRASQDISKYLNWYQQKPGQAPRLLIYHTSRLHSGIPARFSGSGSGTDYTLTISSLQPEDFAVYFCQQGNTLPYTFGQGTKLEIKGGGGSGGGGSGGGGSGGGGSQVQLQESGPGLVKPSETLSLTCTVSGVSLPDYGVSWIRQPPGKGLEWIGVIWGSETTYYQSSLKSRVTISKDNSKNQVSLKLSSVTAADTAVYYCAKHYYYGGSYAMDYWGQGTLVTVSSTTTPAPRPPTPAPTIASQPLSLRPEACRPAAGGAVHTRGLDFACDIYIWAPLAGTCGVLLLSLVITLYCKRGRKKLLYIFKQPFMRPVQTTQEEDGCSCRFPEEEEGGCELRVKFSRSADAPAYKQGQNQLYNELNLGRREEYDVLDKRRGRDPEMGGKPRRKNPQEGLYNELQKDKMAEAYSEIGMKGERRRGKGHDGLYQGLSTATKDTYDALHMQALPPR

SEQ ID NO: 923 - protein, 247 aa, synthetic construct
  REGION 1..247: note = source = /note="Description of Artificial Sequence: Synthetic polypeptide"
QVQLQESGPGLVKPSETLSLTCTVSGVSLPDYGVSWIRQPPGKGLEWIGVIWGSETTYYSSSLKSRVTISKDNSKNQVSLKLSSVTAADTAVYYCAKHYYYGGSYAMDYWGQGTLVTVSSGGGGSGGGGSGGGGSGGGGSEIVMTQSPATLSLSPGERATLSCRASQDISKYLNWYQQKPGQAPRLLIYHTSRLHSGIPARFSGSGSGTDYTLTISSLQPEDFAVYFCQQGNTLPYTFGQGTKLEIK

SEQ ID NO: 924 - DNA, 828 bp, synthetic construct
  misc_feature 1..828: note = source = /note="Description of Artificial Sequence: Synthetic polynucleotide"
  source 1..828: mol_type = other DNA
atggcactgcctgtcactgccctcctgctgcctctggccctccttctgcatgccgccaggccccaagtccagctgcaagagtcaggacccggactggtgaagccgtctgagactctctcactgacttgtaccgtcagcggcgtgtccctccccgactacggagtgtcatggatccgccaacctcccgggaaagggcttgaatggattggtgtcatctggggttctgaaaccacctactactcatcttccctgaagtccagggtgaccatcagcaaggataattccaagaaccaggtcagccttaagctgtcatctgtgaccgctgctgacaccgccgtgtattactgcgccaagcactactattacggaggaagctacgctatggactattggggacagggcactctcgtgactgtgagcagcggcggtggagggtctggaggtggaggatccggtggtggtgggtcaggcggaggagggagcgagattgtgatgactcagtcaccagccaccctttctctttcacccggcgagagagcaaccctgagctgtagagccagccaggacatttctaagtacctcaactggtatcagcaaaaaccggggcaggcccctcgcctcctgatctaccatacctcacgccttcactctggtatccccgctcggtttagcggatcaggatctggtaccgactacactctgaccatttccagcctgcagccagaagatttcgcagtgtatttctgccagcagggcaatacccttccttacaccttcggtcagggaaccaagctcgaaatcaagcaccatcaccatcatcaccaccat

SEQ ID NO: 925 - protein, 276 aa, synthetic construct
  REGION 1..276: note = source = /note="Description of Artificial Sequence: Synthetic polypeptide"
MALPVTALLLPLALLLHAARPQVQLQESGPGLVKPSETLSLTCTVSGVSLPDYGVSWIRQPPGKGLEWIGVIWGSETTYYSSSLKSRVTISKDNSKNQVSLKLSSVTAADTAVYYCAKHYYYGGSYAMDYWGQGTLVTVSSGGGGSGGGGSGGGGSGGGGSEIVMTQSPATLSLSPGERATLSCRASQDISKYLNWYQQKPGQAPRLLIYHTSRLHSGIPARFSGSGSGTDYTLTISSLQPEDFAVYFCQQGNTLPYTFGQGTKLEIKHHHHHHHH

SEQ ID NO: 926 - DNA, 1473 bp, synthetic construct
  misc_feature 1..1473: note = source = /note="Description of Artificial Sequence: Synthetic polynucleotide"
  source 1..1473: mol_type = other DNA
atggctctgcccgtgaccgcactcctcctgccactggctctgctgcttcacgccgctcgcccacaagtccagcttcaagaatcagggcctggtctggtgaagccatctgagactctgtccctcacttgcaccgtgagcggagtgtccctcccagactacggagtgagctggattagacagcctcccggaaagggactggagtggatcggagtgatttggggtagcgaaaccacttactattcatcttccctgaagtcacgggtcaccatttcaaaggataactcaaagaatcaagtgagcctcaagctctcatcagtcaccgccgctgacaccgccgtgtattactgtgccaagcattactactatggagggtcctacgccatggactactggggccagggaactctggtcactgtgtcatctggtggaggaggtagcggaggaggcgggagcggtggaggtggctccggaggtggcggaagcgaaatcgtgatgacccagagccctgcaaccctgtccctttctcccggggaacgggctaccctttcttgtcgggcatcacaagatatctcaaaatacctcaattggtatcaacagaagccgggacaggcccctaggcttcttatctaccacacctctcgcctgcatagcgggattcccgcacgctttagcgggtctggaagcgggaccgactacactctgaccatctcatctctccagcccgaggacttcgccgtctacttctgccagcagggtaacaccctgccgtacaccttcggccagggcaccaagcttgagatcaaaaccactactcccgctccaaggccacccacccctgccccgaccatcgcctctcagccgctttccctgcgtccggaggcatgtagacccgcagctggtggggccgtgcatacccggggtcttgacttcgcctgcgatatctacatttgggcccctctggctggtacttgcggggtcctgctgctttcactcgtgatcactctttactgtaagcgcggtcggaagaagctgctgtacatctttaagcaacccttcatgaggcctgtgcagactactcaagaggaggacggctgttcatgccggttcccagaggaggaggaaggcggctgcgaactgcgcgtgaaattcagccgcagcgcagatgctccagcctacaagcaggggcagaaccagctctacaacgaactcaatcttggtcggagagaggagtacgacgtgctggacaagcggagaggacgggacccagaaatgggcgggaagccgcgcagaaagaatccccaagagggcctgtacaacgagctccaaaaggataagatggcagaagcctatagcgagattggtatgaaaggggaacgcagaagaggcaaaggccacgacggactgtaccagggactcagcaccgccaccaaggacacctatgacgctcttcacatgcaggccctgccgcctcgg

SEQ ID NO: 927 - protein, 491 aa, synthetic construct
  REGION 1..491: note = source = /note="Description of Artificial Sequence: Synthetic polypeptide"
MALPVTALLLPLALLLHAARPQVQLQESGPGLVKPSETLSLTCTVSGVSLPDYGVSWIRQPPGKGLEWIGVIWGSETTYYSSSLKSRVTISKDNSKNQVSLKLSSVTAADTAVYYCAKHYYYGGSYAMDYWGQGTLVTVSSGGGGSGGGGSGGGGSGGGGSEIVMTQSPATLSLSPGERATLSCRASQDISKYLNWYQQKPGQAPRLLIYHTSRLHSGIPARFSGSGSGTDYTLTISSLQPEDFAVYFCQQGNTLPYTFGQGTKLEIKTTTPAPRPPTPAPTIASQPLSLRPEACRPAAGGAVHTRGLDFACDIYIWAPLAGTCGVLLLSLVITLYCKRGRKKLLYIFKQPFMRPVQTTQEEDGCSCRFPEEEEGGCELRVKFSRSADAPAYKQGQNQLYNELNLGRREEYDVLDKRRGRDPEMGGKPRRKNPQEGLYNELQKDKMAEAYSEIGMKGERRRGKGHDGLYQGLSTATKDTYDALHMQALPPR

SEQ ID NO: 928 - protein, 247 aa, synthetic construct
  REGION 1..247: note = source = /note="Description of Artificial Sequence: Synthetic polypeptide"
QVQLQESGPGLVKPSETLSLTCTVSGVSLPDYGVSWIRQPPGKGLEWIGVIWGSETTYYQSSLKSRVTISKDNSKNQVSLKLSSVTAADTAVYYCAKHYYYGGSYAMDYWGQGTLVTVSSGGGGSGGGGSGGGGSGGGGSEIVMTQSPATLSLSPGERATLSCRASQDISKYLNWYQQKPGQAPRLLIYHTSRLHSGIPARFSGSGSGTDYTLTISSLQPEDFAVYFCQQGNTLPYTFGQGTKLEIK

SEQ ID NO: 929 - DNA, 828 bp, synthetic construct
  misc_feature 1..828: note = source = /note="Description of Artificial Sequence: Synthetic polynucleotide"
  source 1..828: mol_type = other DNA
atggcactgcctgtcactgccctcctgctgcctctggccctccttctgcatgccgccaggccccaagtccagctgcaagagtcaggacccggactggtgaagccgtctgagactctctcactgacttgtaccgtcagcggcgtgtccctccccgactacggagtgtcatggatccgccaacctcccgggaaagggcttgaatggattggtgtcatctggggttctgaaaccacctactaccagtcttccctgaagtccagggtgaccatcagcaaggataattccaagaaccaggtcagccttaagctgtcatctgtgaccgctgctgacaccgccgtgtattactgcgccaagcactactattacggaggaagctacgctatggactattggggacagggcactctcgtgactgtgagcagcggcggtggagggtctggaggtggaggatccggtggtggtgggtcaggcggaggagggagcgagattgtgatgactcagtcaccagccaccctttctctttcacccggcgagagagcaaccctgagctgtagagccagccaggacatttctaagtacctcaactggtatcagcaaaaaccggggcaggcccctcgcctcctgatctaccatacctcacgccttcactctggtatccccgctcggtttagcggatcaggatctggtaccgactacactctgaccatttccagcctgcagccagaagatttcgcagtgtatttctgccagcagggcaatacccttccttacaccttcggtcagggaaccaagctcgaaatcaagcaccatcaccatcatcatcaccac

SEQ ID NO: 930 - protein, 276 aa, synthetic construct
  REGION 1..276: note = source = /note="Description of Artificial Sequence: Synthetic polypeptide"
MALPVTALLLPLALLLHAARPQVQLQESGPGLVKPSETLSLTCTVSGVSLPDYGVSWIRQPPGKGLEWIGVIWGSETTYYQSSLKSRVTISKDNSKNQVSLKLSSVTAADTAVYYCAKHYYYGGSYAMDYWGQGTLVTVSSGGGGSGGGGSGGGGSGGGGSEIVMTQSPATLSLSPGERATLSCRASQDISKYLNWYQQKPGQAPRLLIYHTSRLHSGIPARFSGSGSGTDYTLTISSLQPEDFAVYFCQQGNTLPYTFGQGTKLEIKHHHHHHHH

SEQ ID NO: 931 - DNA, 1473 bp, synthetic construct
  misc_feature 1..1473: note = source = /note="Description of Artificial Sequence: Synthetic polynucleotide"
  source 1..1473: mol_type = other DNA
atggctctgcccgtgaccgcactcctcctgccactggctctgctgcttcacgccgctcgcccacaagtccagcttcaagaatcagggcctggtctggtgaagccatctgagactctgtccctcacttgcaccgtgagcggagtgtccctcccagactacggagtgagctggattagacagcctcccggaaagggactggagtggatcggagtgatttggggtagcgaaaccacttactatcaatcttccctgaagtcacgggtcaccatttcaaaggataactcaaagaatcaagtgagcctcaagctctcatcagtcaccgccgctgacaccgccgtgtattactgtgccaagcattactactatggagggtcctacgccatggactactggggccagggaactctggtcactgtgtcatctggtggaggaggtagcggaggaggcgggagcggtggaggtggctccggaggcggtgggtcagaaatcgtgatgacccagagccctgcaaccctgtccctttctcccggggaacgggctaccctttcttgtcgggcatcacaagatatctcaaaatacctcaattggtatcaacagaagccgggacaggcccctaggcttcttatctaccacacctctcgcctgcatagcgggattcccgcacgctttagcgggtctggaagcgggaccgactacactctgaccatctcatctctccagcccgaggacttcgccgtctacttctgccagcagggtaacaccctgccgtacaccttcggccagggcaccaagcttgagatcaaaaccactactcccgctccaaggccacccacccctgccccgaccatcgcctctcagccgctttccctgcgtccggaggcatgtagacccgcagctggtggggccgtgcatacccggggtcttgacttcgcctgcgatatctacatttgggcccctctggctggtacttgcggggtcctgctgctttcactcgtgatcactctttactgtaagcgcggtcggaagaagctgctgtacatctttaagcaacccttcatgaggcctgtgcagactactcaagaggaggacggctgttcatgccggttcccagaggaggaggaaggcggctgcgaactgcgcgtgaaattcagccgcagcgcagatgctccagcctacaagcaggggcagaaccagctctacaacgaactcaatcttggtcggagagaggagtacgacgtgctggacaagcggagaggacgggacccagaaatgggcgggaagccgcgcagaaagaatccccaagagggcctgtacaacgagctccaaaaggataagatggcagaagcctatagcgagattggtatgaaaggggaacgcagaagaggcaaaggccacgacggactgtaccagggactcagcaccgccaccaaggacacctatgacgctcttcacatgcaggccctgccgcctcgg

SEQ ID NO: 932 - protein, 491 aa, synthetic construct
  REGION 1..491: note = source = /note="Description of Artificial Sequence: Synthetic polypeptide"
MALPVTALLLPLALLLHAARPQVQLQESGPGLVKPSETLSLTCTVSGVSLPDYGVSWIRQPPGKGLEWIGVIWGSETTYYQSSLKSRVTISKDNSKNQVSLKLSSVTAADTAVYYCAKHYYYGGSYAMDYWGQGTLVTVSSGGGGSGGGGSGGGGSGGGGSEIVMTQSPATLSLSPGERATLSCRASQDISKYLNWYQQKPGQAPRLLIYHTSRLHSGIPARFSGSGSGTDYTLTISSLQPEDFAVYFCQQGNTLPYTFGQGTKLEIKTTTPAPRPPTPAPTIASQPLSLRPEACRPAAGGAVHTRGLDFACDIYIWAPLAGTCGVLLLSLVITLYCKRGRKKLLYIFKQPFMRPVQTTQEEDGCSCRFPEEEEGGCELRVKFSRSADAPAYKQGQNQLYNELNLGRREEYDVLDKRRGRDPEMGGKPRRKNPQEGLYNELQKDKMAEAYSEIGMKGERRRGKGHDGLYQGLSTATKDTYDALHMQALPPR

SEQ ID NO: 933 - protein, 247 aa, synthetic construct
  REGION 1..247: note = source = /note="Description of Artificial Sequence: Synthetic polypeptide"
EIVMTQSPATLSLSPGERATLSCRASQDISKYLNWYQQKPGQAPRLLIYHTSRLHSGIPARFSGSGSGTDYTLTISSLQPEDFAVYFCQQGNTLPYTFGQGTKLEIKGGGGSGGGGSGGGGSGGGGSQVQLQESGPGLVKPSETLSLTCTVSGVSLPDYGVSWIRQPPGKGLEWIGVIWGSETTYYNSSLKSRVTISKDNSKNQVSLKLSSVTAADTAVYYCAKHYYYGGSYAMDYWGQGTLVTVSS

SEQ ID NO: 934 - DNA, 828 bp, synthetic construct
  misc_feature 1..828: note = source = /note="Description of Artificial Sequence: Synthetic polynucleotide"
  source 1..828: mol_type = other DNA
atggccctcccagtgaccgctctgctgctgcctctcgcacttcttctccatgccgctcggcctgagatcgtcatgacccaaagccccgctaccctgtccctgtcacccggcgagagggcaaccctttcatgcagggccagccaggacatttctaagtacctcaactggtatcagcagaagccagggcaggctcctcgcctgctgatctaccacaccagccgcctccacagcggtatccccgccagattttccgggagcgggtctggaaccgactacaccctcaccatctcttctctgcagcccgaggatttcgccgtctatttctgccagcaggggaatactctgccgtacaccttcggtcaaggtaccaagctggaaatcaagggaggcggaggatcaggcggtggcggaagcggaggaggtggctccggaggaggaggttcccaagtgcagcttcaagaatcaggacccggacttgtgaagccatcagaaaccctctccctgacttgtaccgtgtccggtgtgagcctccccgactacggagtctcttggattcgccagcctccggggaagggtcttgaatggattggggtgatttggggatcagagactacttactacaattcatcacttaagtcacgggtcaccatcagcaaagataatagcaagaaccaagtgtcacttaagctgtcatctgtgaccgccgctgacaccgccgtgtactattgtgccaaacattactattacggagggtcttatgctatggactactggggacaggggaccctggtgactgtctctagccatcaccatcaccaccatcatcac

SEQ ID NO: 935 - protein, 276 aa, synthetic construct
  REGION 1..276: note = source = /note="Description of Artificial Sequence: Synthetic polypeptide"
MALPVTALLLPLALLLHAARPEIVMTQSPATLSLSPGERATLSCRASQDISKYLNWYQQKPGQAPRLLIYHTSRLHSGIPARFSGSGSGTDYTLTISSLQPEDFAVYFCQQGNTLPYTFGQGTKLEIKGGGGSGGGGSGGGGSGGGGSQVQLQESGPGLVKPSETLSLTCTVSGVSLPDYGVSWIRQPPGKGLEWIGVIWGSETTYYNSSLKSRVTISKDNSKNQVSLKLSSVTAADTAVYYCAKHYYYGGSYAMDYWGQGTLVTVSSHHHHHHHH

SEQ ID NO: 936 - DNA, 1473 bp, synthetic construct
  misc_feature 1..1473: note = source = /note="Description of Artificial Sequence: Synthetic polynucleotide"
  source 1..1473: mol_type = other DNA
atggccctccctgtcaccgccctgctgcttccgctggctcttctgctccacgccgctcggcccgaaattgtgatgacccagtcacccgccactcttagcctttcacccggtgagcgcgcaaccctgtcttgcagagcctcccaagacatctcaaaataccttaattggtatcaacagaagcccggacaggctcctcgccttctgatctaccacaccagccggctccattctggaatccctgccaggttcagcggtagcggatctgggaccgactacaccctcactatcagctcactgcagccagaggacttcgctgtctatttctgtcagcaagggaacaccctgccctacacctttggacagggcaccaagctcgagattaaaggtggaggtggcagcggaggaggtgggtccggcggtggaggaagcggaggcggtgggagccaggtccaactccaagaaagcggaccgggtcttgtgaagccatcagaaactctttcactgacttgtactgtgagcggagtgtctctccccgattacggggtgtcttggatcagacagccaccggggaagggtctggaatggattggagtgatttggggctctgagactacttactacaactcatccctcaagtcacgcgtcaccatctcaaaggacaactctaagaatcaggtgtcactgaaactgtcatctgtgaccgcagccgacaccgccgtgtactattgcgctaagcattactattatggcgggagctacgcaatggattactggggacagggtactctggtcaccgtgtccagcaccactaccccagcaccgaggccacccaccccggctcctaccatcgcctcccagcctctgtccctgcgtccggaggcatgtagacccgcagctggtggggccgtgcatacccggggtcttgacttcgcctgcgatatctacatttgggcccctctggctggtacttgcggggtcctgctgctttcactcgtgatcactctttactgtaagcgcggtcggaagaagctgctgtacatctttaagcaacccttcatgaggcctgtgcagactactcaagaggaggacggctgttcatgccggttcccagaggaggaggaaggcggctgcgaactgcgcgtgaaattcagccgcagcgcagatgctccagcctacaagcaggggcagaaccagctctacaacgaactcaatcttggtcggagagaggagtacgacgtgctggacaagcggagaggacgggacccagaaatgggcgggaagccgcgcagaaagaatccccaagagggcctgtacaacgagctccaaaaggataagatggcagaagcctatagcgagattggtatgaaaggggaacgcagaagaggcaaaggccacgacggactgtaccagggactcagcaccgccaccaaggacacctatgacgctcttcacatgcaggccctgccgcctcgg

SEQ ID NO: 937 - protein, 491 aa, synthetic construct
  REGION 1..491: note = source = /note="Description of Artificial Sequence: Synthetic polypeptide"
MALPVTALLLPLALLLHAARPEIVMTQSPATLSLSPGERATLSCRASQDISKYLNWYQQKPGQAPRLLIYHTSRLHSGIPARFSGSGSGTDYTLTISSLQPEDFAVYFCQQGNTLPYTFGQGTKLEIKGGGGSGGGGSGGGGSGGGGSQVQLQESGPGLVKPSETLSLTCTVSGVSLPDYGVSWIRQPPGKGLEWIGVIWGSETTYYNSSLKSRVTISKDNSKNQVSLKLSSVTAADTAVYYCAKHYYYGGSYAMDYWGQGTLVTVSSTTTPAPRPPTPAPTIASQPLSLRPEACRPAAGGAVHTRGLDFACDIYIWAPLAGTCGVLLLSLVITLYCKRGRKKLLYIFKQPFMRPVQTTQEEDGCSCRFPEEEEGGCELRVKFSRSADAPAYKQGQNQLYNELNLGRREEYDVLDKRRGRDPEMGGKPRRKNPQEGLYNELQKDKMAEAYSEIGMKGERRRGKGHDGLYQGLSTATKDTYDALHMQALPPR

SEQ ID NO: 938 - protein, 247 aa, synthetic construct
  REGION 1..247: note = source = /note="Description of Artificial Sequence: Synthetic polypeptide"
QVQLQESGPGLVKPSETLSLTCTVSGVSLPDYGVSWIRQPPGKGLEWIGVIWGSETTYYNSSLKSRVTISKDNSKNQVSLKLSSVTAADTAVYYCAKHYYYGGSYAMDYWGQGTLVTVSSGGGGSGGGGSGGGGSGGGGSEIVMTQSPATLSLSPGERATLSCRASQDISKYLNWYQQKPGQAPRLLIYHTSRLHSGIPARFSGSGSGTDYTLTISSLQPEDFAVYFCQQGNTLPYTFGQGTKLEIK

SEQ ID NO: 939 - DNA, 828 bp, synthetic construct
  misc_feature 1..828: note = source = /note="Description of Artificial Sequence: Synthetic polynucleotide"
  source 1..828: mol_type = other DNA
atggcactgcctgtcactgccctcctgctgcctctggccctccttctgcatgccgccaggccccaagtccagctgcaagagtcaggacccggactggtgaagccgtctgagactctctcactgacttgtaccgtcagcggcgtgtccctccccgactacggagtgtcatggatccgccaacctcccgggaaagggcttgaatggattggtgtcatctggggttctgaaaccacctactacaactcttccctgaagtccagggtgaccatcagcaaggataattccaagaaccaggtcagccttaagctgtcatctgtgaccgctgctgacaccgccgtgtattactgcgccaagcactactattacggaggaagctacgctatggactattggggacagggcactctcgtgactgtgagcagcggcggtggagggtctggaggtggaggatccggtggtggtgggtcaggcggaggagggagcgagattgtgatgactcagtcaccagccaccctttctctttcacccggcgagagagcaaccctgagctgtagagccagccaggacatttctaagtacctcaactggtatcagcaaaaaccggggcaggcccctcgcctcctgatctaccatacctcacgccttcactctggtatccccgctcggtttagcggatcaggatctggtaccgactacactctgaccatttccagcctgcagccagaagatttcgcagtgtatttctgccagcagggcaatacccttccttacaccttcggtcagggaaccaagctcgaaatcaagcaccatcaccatcatcaccaccat

SEQ ID NO: 940 - protein, 276 aa, synthetic construct
  REGION 1..276: note = source = /note="Description of Artificial Sequence: Synthetic polypeptide"
MALPVTALLLPLALLLHAARPQVQLQESGPGLVKPSETLSLTCTVSGVSLPDYGVSWIRQPPGKGLEWIGVIWGSETTYYNSSLKSRVTISKDNSKNQVSLKLSSVTAADTAVYYCAKHYYYGGSYAMDYWGQGTLVTVSSGGGGSGGGGSGGGGSGGGGSEIVMTQSPATLSLSPGERATLSCRASQDISKYLNWYQQKPGQAPRLLIYHTSRLHSGIPARFSGSGSGTDYTLTISSLQPEDFAVYFCQQGNTLPYTFGQGTKLEIKHHHHHHHH

SEQ ID NO: 941 - DNA, 1473 bp, synthetic construct; identical to SEQ ID NO: 936
  misc_feature 1..1473: note = source = /note="Description of Artificial Sequence: Synthetic polynucleotide"
  source 1..1473: mol_type = other DNA

SEQ ID NO: 942 - protein, 491 aa, synthetic construct; identical to SEQ ID NO: 937
  REGION 1..491: note = source = /note="Description of Artificial Sequence: Synthetic polypeptide"

SEQ ID NO: 943 - protein, 242 aa, synthetic construct
  REGION 1..242: note = source = /note="Description of Artificial Sequence: Synthetic polypeptide"
EIVMTQSPATLSLSPGERATLSCRASQDISKYLNWYQQKPGQAPRLLIYHTSRLHSGIPARFSGSGSGTDYTLTISSLQPEDFAVYFCQQGNTLPYTFGQGTKLEIKGGGGSGGGGSGGGGSQVQLQESGPGLVKPSETLSLTCTVSGVSLPDYGVSWIRQPPGKGLEWIGVIWGSETTYYNSSLKSRVTISKDNSKNQVSLKLSSVTAADTAVYYCAKHYYYGGSYAMDYWGQGTLVTVSS

SEQ ID NO: 944 - DNA, 813 bp, synthetic construct
  misc_feature 1..813: note = source = /note="Description of Artificial Sequence: Synthetic polynucleotide"
  source 1..813: mol_type = other DNA
atggccctccctgtcaccgccctgctgcttccgctggctcttctgctccacgccgctcggcccgaaattgtgatgacccagtcacccgccactcttagcctttcacccggtgagcgcgcaaccctgtcttgcagagcctcccaagacatctcaaaataccttaattggtatcaacagaagcccggacaggctcctcgccttctgatctaccacaccagccggctccattctggaatccctgccaggttcagcggtagcggatctgggaccgactacaccctcactatcagctcactgcagccagaggacttcgctgtctatttctgtcagcaagggaacaccctgccctacacctttggacagggcaccaagctcgagattaaaggtggaggtggcagcggaggaggtgggtccggcggtggaggaagccaggtccaactccaagaaagcggaccgggtcttgtgaagccatcagaaactctttcactgacttgtactgtgagcggagtgtctctccccgattacggggtgtcttggatcagacagccaccggggaagggtctggaatggattggagtgatttggggctctgagactacttactacaattcatccctcaagtcacgcgtcaccatctcaaaggacaactctaagaatcaggtgtcactgaaactgtcatctgtgaccgcagccgacaccgccgtgtactattgcgctaagcattactattatggcgggagctacgcaatggattactggggacagggtactctggtcaccgtgtccagccaccaccatcatcaccatcaccat

SEQ ID NO: 945 - protein, 271 aa, synthetic construct
  REGION 1..271: note = source = /note="Description of Artificial Sequence: Synthetic polypeptide"
MALPVTALLLPLALLLHAARPEIVMTQSPATLSLSPGERATLSCRASQDISKYLNWYQQKPGQAPRLLIYHTSRLHSGIPARFSGSGSGTDYTLTISSLQPEDFAVYFCQQGNTLPYTFGQGTKLEIKGGGGSGGGGSGGGGSQVQLQESGPGLVKPSETLSLTCTVSGVSLPDYGVSWIRQPPGKGLEWIGVIWGSETTYYNSSLKSRVTISKDNSKNQVSLKLSSVTAADTAVYYCAKHYYYGGSYAMDYWGQGTLVTVSSHHHHHHHH

SEQ ID NO: 946 - DNA, 1473 bp, synthetic construct
  misc_feature 1..1473: note = source = /note="Description of Artificial Sequence: Synthetic polynucleotide"
  source 1..1473: mol_type = other DNA
atggctctgcccgtgaccgcactcctcctgccactggctctgctgcttcacgccgctcgcccacaagtccagcttcaagaatcagggcctggtctggtgaagccatctgagactctgtccctcacttgcaccgtgagcggagtgtccctcccagactacggagtgagctggattagacagcctcccggaaagggactggagtggatcggagtgatttggggtagcgaaaccacttactataactcttccctgaagtcacgggtcaccatttcaaaggataactcaaagaatcaagtgagcctcaagctctcatcagtcaccgccgctgacaccgccgtgtattactgtgccaagcattactactatggagggtcctacgccatggactactggggccagggaactctggtcactgtgtcatctggtggaggaggtagcggaggaggcgggagcggtggaggtggctccggaggtggcggaagcgaaatcgtgatgacccagagccctgcaaccctgtccctttctcccggggaacgggctaccctttcttgtcgggcatcacaagatatctcaaaatacctcaattggtatcaacagaagccgggacaggcccctaggcttcttatctaccacacctctcgcctgcatagcgggattcccgcacgctttagcgggtctggaagcgggaccgactacactctgaccatctcatctctccagcccgaggacttcgccgtctacttctgccagcagggtaacaccctgccgtacaccttcggccagggcaccaagcttgagatcaaaaccactactcccgctccaaggccacccacccctgccccgaccatcgcctctcagccgctttccctgcgtccggaggcatgtagacccgcagctggtggggccgtgcatacccggggtcttgacttcgcctgcgatatctacatttgggcccctctggctggtacttgcggggtcctgctgctttcactcgtgatcactctttactgtaagcgcggtcggaagaagctgctgtacatctttaagcaacccttcatgaggcctgtgcagactactcaagaggaggacggctgttcatgccggttcccagaggaggaggaaggcggctgcgaactgcgcgtgaaattcagccgcagcgcagatgctccagcctacaagcaggggcagaaccagctctacaacgaactcaatcttggtcggagagaggagtacgacgtgctggacaagcggagaggacgggacccagaaatgggcgggaagccgcgcagaaagaatccccaagagggcctgtacaacgagctccaaaaggataagatggcagaagcctatagcgagattggtatgaaaggggaacgcagaagaggcaaaggccacgacggactgtaccagggactcagcaccgccaccaaggacacctatgacgctcttcacatgcaggccctgccgcctcgg

SEQ ID NO: 947 - protein, 491 aa, synthetic construct
  REGION 1..491: note = source = /note="Description of Artificial Sequence: Synthetic polypeptide"
MALPVTALLLPLALLLHAARPQVQLQESGPGLVKPSETLSLTCTVSGVSLPDYGVSWIRQPPGKGLEWIGVIWGSETTYYNSSLKSRVTISKDNSKNQVSLKLSSVTAADTAVYYCAKHYYYGGSYAMDYWGQGTLVTVSSGGGGSGGGGSGGGGSGGGGSEIVMTQSPATLSLSPGERATLSCRASQDISKYLNWYQQKPGQAPRLLIYHTSRLHSGIPARFSGSGSGTDYTLTISSLQPEDFAVYFCQQGNTLPYTFGQGTKLEIKTTTPAPRPPTPAPTIASQPLSLRPEACRPAAGGAVHTRGLDFACDIYIWAPLAGTCGVLLLSLVITLYCKRGRKKLLYIFKQPFMRPVQTTQEEDGCSCRFPEEEEGGCELRVKFSRSADAPAYKQGQNQLYNELNLGRREEYDVLDKRRGRDPEMGGKPRRKNPQEGLYNELQKDKMAEAYSEIGMKGERRRGKGHDGLYQGLSTATKDTYDALHMQALPPR

SEQ ID NO: 948 - protein, 242 aa, synthetic construct
  REGION 1..242: note = source = /note="Description of Artificial Sequence: Synthetic polypeptide"
QVQLQESGPGLVKPSETLSLTCTVSGVSLPDYGVSWIRQPPGKGLEWIGVIWGSETTYYNSSLKSRVTISKDNSKNQVSLKLSSVTAADTAVYYCAKHYYYGGSYAMDYWGQGTLVTVSSGGGGSGGGGSGGGGSEIVMTQSPATLSLSPGERATLSCRASQDISKYLNWYQQKPGQAPRLLIYHTSRLHSGIPARFSGSGSGTDYTLTISSLQPEDFAVYFCQQGNTLPYTFGQGTKLEIK

SEQ ID NO: 949 - DNA, 813 bp, synthetic construct
  misc_feature 1..813: note = source = /note="Description of Artificial Sequence: Synthetic polynucleotide"
  source 1..813: mol_type = other DNA
atggctctgcccgtgaccgcactcctcctgccactggctctgctgcttcacgccgctcgcccacaagtccagcttcaagaatcagggcctggtctggtgaagccatctgagactctgtccctcacttgcaccgtgagcggagtgtccctcccagactacggagtgagctggattagacagcctcccggaaagggactggagtggatcggagtgatttggggtagcgaaaccacttactataactcttccctgaagtcacgggtcaccatttcaaaggataactcaaagaatcaagtgagcctcaagctctcatcagtcaccgccgctgacaccgccgtgtattactgtgccaagcattactactatggagggtcctacgccatggactactggggccagggaactctggtcactgtgtcatctggtggaggaggtagcggaggaggcgggagcggtggaggtggctccgaaatcgtgatgacccagagccctgcaaccctgtccctttctcccggggaacgggctaccctttcttgtcgggcatcacaagatatctcaaaatacctcaattggtatcaacagaagccgggacaggcccctaggcttcttatctaccacacctctcgcctgcatagcgggattcccgcacgctttagcgggtctggaagcgggaccgactacactctgaccatctcatctctccagcccgaggacttcgccgtctacttctgccagcagggtaacaccctgccgtacaccttcggccagggcaccaagcttgagatcaaacatcaccaccatcatcaccatcac

SEQ ID NO: 950 - protein, 271 aa, synthetic construct
  REGION 1..271: note = source = /note="Description of Artificial Sequence: Synthetic polypeptide"
MALPVTALLLPLALLLHAARPQVQLQESGPGLVKPSETLSLTCTVSGVSLPDYGVSWIRQPPGKGLEWIGVIWGSETTYYNSSLKSRVTISKDNSKNQVSLKLSSVTAADTAVYYCAKHYYYGGSYAMDYWGQGTLVTVSSGGGGSGGGGSGGGGSEIVMTQSPATLSLSPGERATLSCRASQDISKYLNWYQQKPGQAPRLLIYHTSRLHSGIPARFSGSGSGTDYTLTISSLQPEDFAVYFCQQGNTLPYTFGQGTKLEIKHHHHHHHH

SEQ ID NO: 951 - DNA, 1458 bp, synthetic construct
  misc_feature 1..1458: note = source = /note="Description of Artificial Sequence: Synthetic polynucleotide"
  source 1..1458: mol_type = other DNA
atggccctccctgtcaccgccctgctgcttccgctggctcttctgctccacgccgctcggcccgaaattgtgatgacccagtcacccgccactcttagcctttcacccggtgagcgcgcaaccctgtcttgcagagcctcccaagacatctcaaaataccttaattggtatcaacagaagcccggacaggctcctcgccttctgatctaccacaccagccggctccattctggaatccctgccaggttcagcggtagcggatctgggaccgactacaccctcactatcagctcactgcagccagaggacttcgctgtctatttctgtcagcaagggaacaccctgccctacacctttggacagggcaccaagctcgagattaaaggtggaggtggcagcggaggaggtgggtccggcggtggaggaagccaggtccaactccaagaaagcggaccgggtcttgtgaagccatcagaaactctttcactgacttgtactgtgagcggagtgtctctccccgattacggggtgtcttggatcagacagccaccggggaagggtctggaatggattggagtgatttggggctctgagactacttactacaactcatccctcaagtcacgcgtcaccatctcaaaggacaactctaagaatcaggtgtcactgaaactgtcatctgtgaccgcagccgacaccgccgtgtactattgcgctaagcattactattatggcgggagctacgcaatggattactggggacagggtactctggtcaccgtgtccagcaccactaccccagcaccgaggccacccaccccggctcctaccatcgcctcccagcctctgtccctgcgtccggaggcatgtagacccgcagctggtggggccgtgcatacccggggtcttgacttcgcctgcgatatctacatttgggcccctctggctggtacttgcggggtcctgctgctttcactcgtgatcactctttactgtaagcgcggtcggaagaagctgctgtacatctttaagcaacccttcatgaggcctgtgcagactactcaagaggaggacggctgttcatgccggttcccagaggaggaggaaggcggctgcgaactgcgcgtgaaattcagccgcagcgcagatgctccagcctacaagcaggggcagaaccagctctacaacgaactcaatcttggtcggagagaggagtacgacgtgctggacaagcggagaggacgggacccagaaatgggcgggaagccgcgcagaaagaatccccaagagggcctgtacaacgagctccaaaaggataagatggcagaagcctatagcgagattggtatgaaaggggaacgcagaagaggcaaaggccacgacggactgtaccagggactcagcaccgccaccaaggacacctatgacgctcttcacatgcaggccctgccgcctcgg

SEQ ID NO: 952 - protein, 486 aa, synthetic construct
  REGION 1..486: note = source = /note="Description of Artificial Sequence: Synthetic polypeptide"
MALPVTALLLPLALLLHAARPEIVMTQSPATLSLSPGERATLSCRASQDISKYLNWYQQKPGQAPRLLIYHTSRLHSGIPARFSGSGSGTDYTLTISSLQPEDFAVYFCQQGNTLPYTFGQGTKLEIKGGGGSGGGGSGGGGSQVQLQESGPGLVKPSETLSLTCTVSGVSLPDYGVSWIRQPPGKGLEWIGVIWGSETTYYNSSLKSRVTISKDNSKNQVSLKLSSVTAADTAVYYCAKHYYYGGSYAMDYWGQGTLVTVSSTTTPAPRPPTPAPTIASQPLSLRPEACRPAAGGAVHTRGLDFACDIYIWAPLAGTCGVLLLSLVITLYCKRGRKKLLYIFKQPFMRPVQTTQEEDGCSCRFPEEEEGGCELRVKFSRSADAPAYKQGQNQLYNELNLGRREEYDVLDKRRGRDPEMGGKPRRKNPQEGLYNELQKDKMAEAYSEIGMKGERRRGKGHDGLYQGLSTATKDTYDALHMQALPPR

SEQ ID NO: 953 - DNA, 813 bp, synthetic construct
  misc_feature 1..813: note = source = /note="Description of Artificial Sequence: Synthetic polynucleotide"
  source 1..813: mol_type = other DNA
atggccctgcccgtcaccgctctgctgctgccccttgctctgcttcttcatgcagcaaggccggacatccagatgacccaaaccacctcatccctctctgcctctcttggagacagggtgaccatttcttgtcgcgccagccaggacatcagcaagtatctgaactggtatcagcagaagccggacggaaccgtgaagctcctgatctaccatacctctcgcctgcatagcggcgtgccctcacgcttctctggaagcggatcaggaaccgattattctctcactatttcaaatcttgagcaggaagatattgccacctatttctgccagcagggtaataccctgccctacaccttcggaggagggaccaagctcgaaatcaccggtggaggaggcagcggcggtggagggtctggtggaggtggttctgaggtgaagctgcaagaatcaggccctggacttgtggccccttcacagtccctgagcgtgacttgcaccgtgtccggagtctccctgcccgactacggagtgtcatggatcagacaacctccacggaaaggactggaatggctcggtgtcatctggggtagcgaaactacttactacaattcagccctcaaaagcaggctgactattatcaaggacaacagcaagtcccaagtctttcttaagatgaactcactccagactgacgacaccgcaatctactattgtgctaagcactactactacggaggatcctacgctatggattactggggacaaggtacttccgtcactgtctcttcacaccatcatcaccatcaccatcac

SEQ ID NO: 954 - protein, 271 aa, synthetic construct
  REGION 1..271: note = source = /note="Description of Artificial Sequence: Synthetic polypeptide"
MALPVTALLLPLALLLHAARPDIQMTQTTSSLSASLGDRVTISCRASQDISKYLNWYQQKPDGTVKLLIYHTSRLHSGVPSRFSGSGSGTDYSLTISNLEQEDIATYFCQQGNTLPYTFGGGTKLEITGGGGSGGGGSGGGGSEVKLQESGPGLVAPSQSLSVTCTVSGVSLPDYGVSWIRQPPRKGLEWLGVIWGSETTYYNSALKSRLTIIKDNSKSQVFLKMNSLQTDDTAIYYCAKHYYYGGSYAMDYWGQGTSVTVSSHHHHHHHH

SEQ ID NO: 955 - DNA, 1458 bp, synthetic construct
  misc_feature 1..1458: note = source = /note="Description of Artificial Sequence: Synthetic polynucleotide"
  source 1..1458: mol_type = other DNA
atggccttaccagtgaccgccttgctcctgccgctggccttgctgctccacgccgccaggccggacatccagatgacacagactacatcctccctgtctgcctctctgggagacagagtcaccatcagttgcagggcaagtcaggacattagtaaatatttaaattggtatcagcagaaaccagatggaactgttaaactcctgatctaccatacatcaagattacactcaggagtcccatcaaggttcagtggcagtgggtctggaacagattattctctcaccattagcaacctggagcaagaagatattgccacttacttttgccaacagggtaatacgcttccgtacacgttcggaggggggaccaagctggagatcacaggtggcggtggctcgggcggtggtgggtcgggtggcggcggatctgaggtgaaactgcaggagtcaggacctggcctggtggcgccctcacagagcctgtccgtcacatgcactgtctcaggggtctcattacccgactatggtgtaagctggattcgccagcctccacgaaagggtctggagtggctgggagtaatatggggtagtgaaaccacatactataattcagctctcaaatccagactgaccatcatcaaggacaactccaagagccaagttttcttaaaaatgaacagtctgcaaactgatgacacagccatttactactgtgccaaacattattactacggtggtagctatgctatggactactggggccaaggaacctcagtcaccgtctcctcaaccacgacgccagcgccgcgaccaccaacaccggcgcccaccatcgcgtcgcagcccctgtccctgcgcccagaggcgtgccggccagcggcggggggcgcagtgcacacgagggggctggacttcgcctgtgatatctacatctgggcgcccttggccgggacttgtggggtccttctcctgtcactggttatcaccctttactgcaaacggggcagaaagaaactcctgtatatattcaaacaaccatttatgagaccagtacaaactactcaagaggaagatggctgtagctgccgatttccagaagaagaagaaggaggatgtgaactgagagtgaagttcagcaggagcgcagacgcccccgcgtacaagcagggccagaaccagctctataacgagctcaatctaggacgaagagaggagtacgatgttttggacaagagacgtggccgggaccctgagatggggggaaagccgagaaggaagaaccctcaggaaggcctgtacaatgaactgcagaaagataagatggcggaggcctacagtgagattgggatgaaaggcgagcgccggaggggcaaggggcacgatggcctttaccagggtctcagtacagccaccaaggacacctacgacgcccttcacatgcaggccctgccccctcgc

SEQ ID NO: 956 - protein, 486 aa, synthetic construct; identical to SEQ ID NO: 891
  REGION 1..486: note = source = /note="Description of Artificial Sequence: Synthetic polypeptide"

SEQ ID NO: 957 - protein, 242 aa, synthetic construct
  REGION 1..242: note = source = /note="Description of Artificial Sequence: Synthetic polypeptide"
DIQMTQTTSSLSASLGDRVTISCRASQDISKYLNWYQQKPDGTVKLLIYHTSRLHSGVPSRFSGSGSGTDYSLTISNLEQEDIATYFCQQGNTLPYTFGGGTKLEITGGGGSGGGGSGGGGSEVKLQESGPGLVAPSQSLSVTCTVSGVSLPDYGVSWIRQPPRKGLEWLGVIWGSETTYYNSALKSRLTIIKDNSKSQVFLKMNSLQTDDTAIYYCAKHYYYGGSYAMDYWGQGTSVTVSS

SEQ ID NO: 958 - protein, 5 aa, synthetic construct
  REGION 1..5: note = source = /note="Description of Artificial Sequence: Synthetic peptide"
DYGVS

SEQ ID NO: 959 - protein, 16 aa, synthetic construct
  REGION 1..16: note = source = /note="Description of Artificial Sequence: Synthetic peptide"
VIWGSETTYYNSALKS

SEQ ID NO: 960 - protein, 12 aa, synthetic construct
  REGION 1..12: note = source = /note="Description of Artificial Sequence: Synthetic peptide"
HYYYGGSYAMDY

SEQ ID NO: 961 - protein, 16 aa, synthetic construct
  REGION 1..16: note = source = /note="Description of Artificial Sequence: Synthetic peptide"
VIWGSETTYYSSSLKS

SEQ ID NO: 962 - protein, 16 aa, synthetic construct
  REGION 1..16: note = source = /note="Description of Artificial Sequence: Synthetic peptide"
VIWGSETTYYQSSLKS

SEQ ID NO: 963 - protein, 16 aa, synthetic construct
  REGION 1..16: note = source = /note="Description of Artificial Sequence: Synthetic peptide"
VIWGSETTYYNSSLKS

SEQ ID NO: 964 - protein, 11 aa, synthetic construct
  REGION 1..11: note = source = /note="Description of Artificial Sequence: Synthetic peptide"
RASQDISKYLN

SEQ ID NO: 965 - protein, 7 aa, synthetic construct
  REGION 1..7: note = source = /note="Description of Artificial Sequence: Synthetic peptide"
HTSRLHS

SEQ ID NO: 966 - protein, 9 aa, synthetic construct
  REGION 1..9: note = source = /note="Description of Artificial Sequence: Synthetic peptide"
QQGNTLPYT

SEQ ID NO: 967 - protein, 239 aa, synthetic construct
  REGION 1..239: note = source = /note="Description of Artificial Sequence: Synthetic polypeptide"
EVQLVESGGGLVQPGGSLRLSCAVSGFALSNHGMSWVRRAPGKGLEWVSGIVYSGSTYYAASVKGRFTISRDNSRNTLYLQMNSLRPEDTAIYYCSAHGGESDVWGQGTTVTVSSASGGGGSGGRASGGGGSDIQLTQSPSSLSASVGDRVTITCRASQSISSYLNWYQQKPGKAPKLLIYAASSLQSGVPSRFSGSGSGTDFTLTISSLQPEDFATYYCQQSYSTPYTFGQGTKVEIK

SEQ ID NO: 968 - DNA, 717 bp, synthetic construct
  misc_feature 1..717: note = source = /note="Description of Artificial Sequence: Synthetic polynucleotide"
  source 1..717: mol_type = other DNA
gaagtgcaattggtggaatcagggggaggacttgtgcagcctggaggatcgctgagactgtcatgtgccgtgtccggctttgccctgtccaaccacgggatgtcctgggtccgccgcgcgcctggaaagggcctcgaatgggtgtcgggtattgtgtacagcggtagcacctactatgccgcatccgtgaaggggagattcaccatcagccgggacaactccaggaacactctgtacctccaaatgaattcgctgaggccagaggacactgccatctactactgctccgcgcatggcggagagtccgacgtctggggacaggggaccaccgtgaccgtgtctagcgcgtccggcggaggcggcagcgggggtcgggcatcagggggcggcggatcggacatccagctcacccagtccccgagctcgctgtccgcctccgtgggagatcgggtcaccatcacgtgccgcgccagccagtcgatttcctcctacctgaactggtaccaacagaagcccggaaaagccccgaagcttctcatctacgccgcctcgagcctgcagtcaggagtgccctcacggttctccggctccggttccggtactgatttcaccctgaccatttcctccctgcaaccggaggacttcgctacttactactgccagcagtcgtactccaccccctacactttcggacaaggcaccaaggtcgaaatcaag

SEQ ID NO: 969 - protein, 115 aa, synthetic construct
  REGION 1..115: note = source = /note="Description of Artificial Sequence: Synthetic polypeptide"
EVQLVESGGGLVQPGGSLRLSCAVSGFALSNHGMSWVRRAPGKGLEWVSGIVYSGSTYYAASVKGRFTISRDNSRNTLYLQMNSLRPEDTAIYYCSAHGGESDVWGQGTTVTVSS

SEQ ID NO: 970 - protein, 107 aa, synthetic construct
  REGION 1..107: note = source = /note="Description of Artificial Sequence: Synthetic polypeptide"
DIQLTQSPSSLSASVGDRVTITCRASQSISSYLNWYQQKPGKAPKLLIYAASSLQSGVPSRFSGSGSGTDFTLTISSLQPEDFATYYCQQSYSTPYTFGQGTKVEIK

SEQ ID NO: 971 - protein, 483 aa, synthetic construct
  REGION 1..483: note = source = /note="Description of Artificial Sequence: Synthetic polypeptide"
MALPVTALLLPLALLLHAARPEVQLVESGGGLVQPGGSLRLSCAVSGFALSNHGMSWVRRAPGKGLEWVSGIVYSGSTYYAASVKGRFTISRDNSRNTLYLQMNSLRPEDTAIYYCSAHGGESDVWGQGTTVTVSSASGGGGSGGRASGGGGSDIQLTQSPSSLSASVGDRVTITCRASQSISSYLNWYQQKPGKAPKLLIYAASSLQSGVPSRFSGSGSGTDFTLTISSLQPEDFATYYCQQSYSTPYTFGQGTKVEIKTTTPAPRPPTPAPTIASQPLSLRPEACRPAAGGAVHTRGLDFACDIYIWAPLAGTCGVLLLSLVITLYCKRGRKKLLYIFKQPFMRPVQTTQEEDGCSCRFPEEEEGGCELRVKFSRSADAPAYKQGQNQLYNELNLGRREEYDVLDKRRGRDPEMGGKPRRKNPQEGLYNELQKDKMAEAYSEIGMKGERRRGKGHDGLYQGLSTATKDTYDALHMQALPPR

SEQ ID NO: 972 - DNA, 1449 bp, synthetic construct
  misc_feature 1..1449: note = source = /note="Description of Artificial Sequence: Synthetic polynucleotide"
  source 1..1449: mol_type = other DNA
atggccctccctgtcaccgccctgctgcttccgctggctcttctgctccacgccgctcggcccgaagtgcaattggtggaatcagggggaggacttgtgcagcctggaggatcgctgagactgtcatgtgccgtgtccggctttgccctgtccaaccacgggatgtcctgggtccgccgcgcgcctggaaagggcctcgaatgggtgtcgggtattgtgtacagcggtagcacctactatgccgcatccgtgaaggggagattcaccatcagccgggacaactccaggaacactctgtacctccaaatgaattcgctgaggccagaggacactgccatctactactgctccgcgcatggcggagagtccgacgtctggggacaggggaccaccgtgaccgtgtctagcgcgtccggcggaggcggcagcgggggtcgggcatcagggggcggcggatcggacatccagctcacccagtccccgagctcgctgtccgcctccgtgggagatcgggtcaccatcacgtgccgcgccagccagtcgatttcctcctacctgaactggtaccaacagaagcccggaaaagccccgaagcttctcatctacgccgcctcgagcctgcagtcaggagtgccctcacggttctccggctccggttccggtactgatttcaccctgaccatttcctccctgcaaccggaggacttcgctacttactactgccagcagtcgtactccaccccctacactttcggacaaggcaccaaggtcgaaatcaagaccactaccccagcaccgaggccacccaccccggctcctaccatcgcctcccagcctctgtccctgcgtccggaggcatgtagacccgcagctggtggggccgtgcatacccggggtcttgacttcgcctgcgatatctacatttgggcccctctggctggtacttgcggggtcctgctgctttcactcgtgatcactctttactgtaagcgcggtcggaagaagctgctgtacatctttaagcaacccttcatgaggcctgtgcagactactcaagaggaggacggctgttcatgccggttcccagaggaggaggaaggcggctgcgaactgcgcgtgaaattcagccgcagcgcagatgctccagcctacaagcaggggcagaaccagctctacaacgaactcaatcttggtcggagagaggagtacgacgtgctggacaagcggagaggacgggacccagaaatgggcgggaagccgcgcagaaagaatccccaagagggcctgtacaacgagctccaaaaggataagatggcagaagcctatagcgagattggtatgaaaggggaacgcagaagaggcaaaggccacgacggactgtaccagggactcagcaccgccaccaaggacacctatgacgctcttcacatgcaggccctgccgcctcgg

SEQ ID NO: 973 - protein, 246 aa, synthetic construct
  REGION 1..246: note = source = /note="Description of Artificial Sequence: Synthetic polypeptide"
QVQLVESGGGLVQPGRSLRLSCAASGFTFSNYAMSWVRQAPGKGLGWVSGISRSGENTYYADSVKGRFTISRDNSKNTLYLQMNSLRDEDTAVYYCARSPAHYYGGMDVWGQGTTVTVSSASGGGGSGGRASGGGGSDIVLTQSPGTLSLSPGERATLSCRASQSISSSFLAWYQQKPGQAPRLLIYGASRRATGIPDRFSGSGSGTDFTLTISRLEPEDSAVYYCQQYHSSPSWTFGQGTKLEIK

SEQ ID NO: 974 - DNA, 738 bp, synthetic construct
  misc_feature 1..738: note = source = /note="Description of Artificial Sequence: Synthetic polynucleotide"
  source 1..738: mol_type = other DNA
caagtgcaactcgtggaatctggtggaggactcgtgcaacccggaagatcgcttagactgtcgtgtgccgccagcgggttcactttctcgaactacgcgatgtcctgggtccgccaggcacccggaaagggactcggttgggtgtccggcatttcccggtccggcgaaaatacctactacgccgactccgtgaagggccgcttcaccatctcaagggacaacagcaaaaacaccctgtacttgcaaatgaactccctgcgggatgaagatacagccgtgtactattgcgcccggtcgcctgcccattactacggcggaatggacgtctggggacagggaaccactgtgactgtcagcagcgcgtcgggtggcggcggctcagggggtcgggcctccggggggggagggtccgacatcgtgctgacccagtccccgggaaccctgagcctgagcccgggagagcgcgcgaccctgtcatgccgggcatcccagagcattagctcctcctttctcgcctggtatcagcagaagcccggacaggccccgaggctgctgatctacggcgctagcagaagggctaccggaatcccagaccggttctccggctccggttccgggaccgatttcacccttactatctcgcgcctggaacctgaggactccgccgtctactactgccagcagtaccactcatccccgtcgtggacgttcggacagggcaccaagctggagattaag

SEQ ID NO: 975 - protein, 120 aa, synthetic construct
  REGION 1..120: note = source = /note="Description of Artificial Sequence: Synthetic polypeptide"
QVQLVESGGGLVQPGRSLRLSCAASGFTFSNYAMSWVRQAPGKGLGWVSGISRSGENTYYADSVKGRFTISRDNSKNTLYLQMNSLRDEDTAVYYCARSPAHYYGGMDVWGQGTTVTVSS

SEQ ID NO: 976 - protein, 109 aa, synthetic construct
  REGION 1..109: note = source = /note="Description of Artificial Sequence: Synthetic polypeptide"
DIVLTQSPGTLSLSPGERATLSCRASQSISSSFLAWYQQKPGQAPRLLIYGASRRATGIPDRFSGSGSGTDFTLTISRLEPEDSAVYYCQQYHSSPSWTFGQGTKLEIK

SEQ ID NO: 977 - protein, 490 aa, synthetic construct
  REGION 1..490: note = source = /note="Description of Artificial Sequence: Synthetic polypeptide"
MALPVTALLLPLALLLHAARPQVQLVESGGGLVQPGRSLRLSCAASGFTFSNYAMSWVRQAPGKGLGWVSGISRSGENTYYADSVKGRFTISRDNSKNTLYLQMNSLRDEDTAVYYCARSPAHYYGGMDVWGQGTTVTVSSASGGGGSGGRASGGGGSDIVLTQSPGTLSLSPGERATLSCRASQSISSSFLAWYQQKPGQAPRLLIYGASRRATGIPDRFSGSGSGTDFTLTISRLEPEDSAVYYCQQYHSSPSWTFGQGTKLEIKTTTPAPRPPTPAPTIASQPLSLRPEACRPAAGGAVHTRGLDFACDIYIWAPLAGTCGVLLLSLVITLYCKRGRKKLLYIFKQPFMRPVQTTQEEDGCSCRFPEEEEGGCELRVKFSRSADAPAYKQGQNQLYNELNLGRREEYDVLDKRRGRDPEMGGKPRRKNPQEGLYNELQKDKMAEAYSEIGMKGERRRGKGHDGLYQGLSTATKDTYDALHMQALPPR

SEQ ID NO: 978 - DNA, 1470 bp, synthetic construct
  misc_feature 1..1470: note = source = /note="Description of Artificial Sequence: Synthetic polynucleotide"
  source 1..1470: mol_type = other DNA
atggccctccctgtcaccgccctgctgcttccgctggctcttctgctccacgccgctcggccccaagtgcaactcgtggaatctggtggaggactcgtgcaacccggaagatcgcttagactgtcgtgtgccgccagcgggttcactttctcgaactacgcgatgtcctgggtccgccaggcacccggaaagggactcggttgggtgtccggcatttcccggtccggcgaaaatacctactacgccgactccgtgaagggccgcttcaccatctcaagggacaacagcaaaaacaccctgtacttgcaaatgaactccctgcgggatgaagatacagccgtgtactattgcgcccggtcgcctgcccattactacggcggaatggacgtctggggacagggaaccactgtgactgtcagcagcgcgtcgggtggcggcggctcagggggtcgggcctccggggggggagggtccgacatcgtgctgacccagtccccgggaaccctgagcctgagcccgggagagcgcgcgaccctgtcatgccgggcatcccagagcattagctcctcctttctcgcctggtatcagcagaagcccggacaggccccgaggctgctgatctacggcgctagcagaagggctaccggaatcccagaccggttctccggctccggttccgggaccgatttcacccttactatctcgcgcctggaacctgaggactccgccgtctactactgccagcagtaccactcatccccgtcgtggacgttcggacagggcaccaagctggagattaagaccactaccccagcaccgaggccacccaccccggctcctaccatcgcctcccagcctctgtccctgcgtccggaggcatgtagacccgcagctggtggggccgtgcatacccggggtcttgacttcgcctgcgatatctacatttgggcccctctggctggtacttgcggggtcctgctgctttcactcgtgatcactctttactgtaagcgcggtcggaagaagctgctgtacatctttaagcaacccttcatgaggcctgtgcagactactcaagaggaggacggctgttcatgccggttcccagaggaggaggaaggcggctgcgaactgcgcgtgaaattcagccgcagcgcagatgctccagcctacaagcaggggcagaaccagctctacaacgaactcaatcttggtcggagagaggagtacgacgtgctggacaagcggagaggacgggacccagaaatgggcgggaagccgcgcagaaagaatccccaagagggcctgtacaacgagctccaaaaggataagatggcagaagcctatagcgagattggtatgaaaggggaacgcagaagaggcaaaggccacgacggactgtaccagggactcagcaccgccaccaaggacacctatgacgctcttcacatgcaggccctgccgcctcgg

SEQ ID NO: 979 - protein, 244 aa, synthetic construct
  REGION 1..244: note = source = /note="Description of Artificial Sequence: Synthetic polypeptide"
QVQLVESGGGLVQPGRSLRLSCAASGFTFDDYAMHWVRQAPGKGLEWVSGISWNSGSIGYADSVKGRFTISRDNAKNSLYLQMNSLRAEDTALYYCSVHSFLAYWGQGTLVTVSSASGGGGSGGRASGGGGSDIVMTQTPLSLPVTPGEPASISCRSSQSLLHSNGYNYLDWYLQKPGQSPQLLIYLGSNRASGVPDRFSGSGSGTDFTLKISRVEAEDVGVYYCMQALQTPYTFGQGTKVEIK

SEQ ID NO: 980 - DNA, 732 bp, synthetic construct
  misc_feature 1..732: note = source = /note="Description of Artificial Sequence: Synthetic polynucleotide"
  source 1..732: mol_type = other DNA
caagtgcaactcgtcgaatccggtggaggtctggtccaacctggtagaagcctgagactgtcgtgtgcggccagcggattcacctttgatgactatgctatgcactgggtgcggcaggccccaggaaagggcctggaatgggtgtcgggaattagctggaactccgggtccattggctacgccgactccgtgaagggccgcttcaccatctcccgcgacaacgcaaagaactccctgtacttgcaaatgaactcgctcagggctgaggataccgcgctgtactactgctccgtgcattccttcctggcctactggggacagggaactctggtcaccgtgtcgagcgcctccggcggcgggggctcgggtggacgggcctcgggcggaggggggtccgacatcgtgatgacccagaccccgctgagcttgcccgtgactcccggagagcctgcatccatctcctgccggtcatcccagtcccttctccactccaacggatacaactacctcgactggtacctccagaagccgggacagagccctcagcttctgatctacctggggtcaaatagagcctcaggagtgccggatcggttcagcggatctggttcgggaactgatttcactctgaagatttcccgcgtggaagccgaggacgtgggcgtctactactgtatgcaggcgctgcagaccccctataccttcggccaagggacgaaagtggagatcaag

SEQ ID NO: 981 - protein, 115 aa, synthetic construct
  REGION 1..115: note = source = /note="Description of Artificial Sequence: Synthetic polypeptide"
QVQLVESGGGLVQPGRSLRLSCAASGFTFDDYAMHWVRQAPGKGLEWVSGISWNSGSIGYADSVKGRFTISRDNAKNSLYLQMNSLRAEDTALYYCSVHSFLAYWGQGTLVTVSS

SEQ ID NO: 982 - protein, 112 aa, synthetic construct
  REGION 1..112: note = source = /note="Description of Artificial Sequence: Synthetic polypeptide"
DIVMTQTPLSLPVTPGEPASISCRSSQSLLHSNGYNYLDWYLQKPGQSPQLLIYLGSNRASGVPDRFSGSGSGTDFTLKISRVEAEDVGVYYCMQALQTPYTFGQGTKVEIK

SEQ ID NO: 983 - protein, 488 aa, synthetic construct
  REGION 1..488: note = source = /note="Description of Artificial Sequence: Synthetic polypeptide"
MALPVTALLLPLALLLHAARPQVQLVESGGGLVQPGRSLRLSCAASGFTFDDYAMHWVRQAPGKGLEWVSGISWNSGSIGYADSVKGRFTISRDNAKNSLYLQMNSLRAEDTALYYCSVHSFLAYWGQGTLVTVSSASGGGGSGGRASGGGGSDIVMTQTPLSLPVTPGEPASISCRSSQSLLHSNGYNYLDWYLQKPGQSPQLLIYLGSNRASGVPDRFSGSGSGTDFTLKISRVEAEDVGVYYCMQALQTPYTFGQGTKVEIKTTTPAPRPPTPAPTIASQPLSLRPEACRPAAGGAVHTRGLDFACDIYIWAPLAGTCGVLLLSLVITLYCKRGRKKLLYIFKQPFMRPVQTTQEEDGCSCRFPEEEEGGCELRVKFSRSADAPAYKQGQNQLYNELNLGRREEYDVLDKRRGRDPEMGGKPRRKNPQEGLYNELQKDKMAEAYSEIGMKGERRRGKGHDGLYQGLSTATKDTYDALHMQALPPR

SEQ ID NO: 984 - DNA, 1464 bp, synthetic construct
  misc_feature 1..1464: note = source = /note="Description of Artificial Sequence: Synthetic polynucleotide"
  source 1..1464: mol_type = other DNA
atggccctccctgtcaccgccctgctgcttccgctggctcttctgctccacgccgctcggccccaagtgcaactcgtcgaatccggtggaggtctggtccaacctggtagaagcctgagactgtcgtgtgcggccagcggattcacctttgatgactatgctatgcactgggtgcggcaggccccaggaaagggcctggaatgggtgtcgggaattagctggaactccgggtccattggctacgccgactccgtgaagggccgcttcaccatctcccgcgacaacgcaaagaactccctgtacttgcaaatgaactcgctcagggctgaggataccgcgctgtactactgctccgtgcattccttcctggcctactggggacagggaactctggtcaccgtgtcgagcgcctccggcggcgggggctcgggtggacgggcctcgggcggaggggggtccgacatcgtgatgacccagaccccgctgagcttgcccgtgactcccggagagcctgcatccatctcctgccggtcatcccagtcccttctccactccaacggatacaactacctcgactggtacctccagaagccgggacagagccctcagcttctgatctacctggggtcaaatagagcctcaggagtgccggatcggttcagcggatctggttcgggaactgatttcactctgaagatttcccgcgtggaagccgaggacgtgggcgtctactactgtatgcaggcgctgcagaccccctataccttcggccaagggacgaaagtggagatcaagaccactaccccagcaccgaggccacccaccccggctcctaccatcgcctcccagcctctgtccctgcgtccggaggcatgtagacccgcagctggtggggccgtgcatacccggggtcttgacttcgcctgcgatatctacatttgggcccctctggctggtacttgcggggtcctgctgctttcactcgtgatcactctttactgtaagcgcggtcggaagaagctgctgtacatctttaagcaacccttcatgaggcctgtgcagactactcaagaggaggacggctgttcatgccggttcccagaggaggaggaaggcggctgcgaactgcgcgtgaaattcagccgcagcgcagatgctccagcctacaagcaggggcagaaccagctctacaacgaactcaatcttggtcggagagaggagtacgacgtgctggacaagcggagaggacgggacccagaaatgggcgggaagccgcgcagaaagaatccccaagagggcctgtacaacgagctccaaaaggataagatggcagaagcctatagcgagattggtatgaaaggggaacgcagaagaggcaaaggccacgacggactgtaccagggactcagcaccgccaccaaggacacctatgacgctcttcacatgcaggccctgccgcctcgg

SEQ ID NO: 985 - protein, 243 aa, synthetic construct
  REGION 1..243: note = source = /note="Description of Artificial Sequence: Synthetic polypeptide"
EVQLLESGGGLVQPGGSLRLSCAVSGFALSNHGMSWVRRAPGKGLEWVSGIVYSGSTYYAASVKGRFTISRDNSRNTLYLQMNSLRPEDTAIYYCSAHGGESDVWGQGTTVTVSSASGGGGSGGRASGGGGSDIVMTQTPLSLSVTPGQPASISCKSSQSLLRNDGKTPLYWYLQKAGQPPQLLIYEVSNRFSGVPDRFSGSGSGTDFTLKISRVEAEDVGAYYCMQNIQFPSFGGGTKLEIK

SEQ ID NO: 986 - DNA, 729 bp, synthetic construct
  misc_feature 1..729: note = source = /note="Description of Artificial Sequence: Synthetic polynucleotide"
  source 1..729: mol_type = other DNA
gaagtgcaattgttggaatctggaggaggacttgtgcagcctggaggatcactgagactttcgtgtgcggtgtcaggcttcgccctgagcaaccacggcatgagctgggtgcggagagccccggggaagggtctggaatgggtgtccgggatcgtctactccggttcaacttactacgccgcaagcgtgaagggtcgcttcaccatttcccgcgataactcccggaacaccctgtacctccaaatgaactccctgcggcccgaggacaccgccatctactactgttccgcgcatggaggagagtccgatgtctggggacagggcactaccgtgaccgtgtcgagcgcctcggggggaggaggctccggcggtcgcgcctccggggggggtggcagcgacattgtgatgacgcagactccactctcgctgtccgtgaccccgggacagcccgcgtccatctcgtgcaagagctcccagagcctgctgaggaacgacggaaagactcctctgtattggtacctccagaaggctggacagcccccgcaactgctcatctacgaagtgtcaaatcgcttctccggggtgccggatcggttttccggctcgggatcgggcaccgacttcaccctgaaaatctccagggtcgaggccgaggacgtgggagcctactactgcatgcaaaacatccagttcccttccttcggcggcggcacaaagctggagattaag

SEQ ID NO: 987 - protein, 115 aa, synthetic construct
  REGION 1..115: note = source = /note="Description of Artificial Sequence: Synthetic polypeptide"
EVQLLESGGGLVQPGGSLRLSCAVSGFALSNHGMSWVRRAPGKGLEWVSGIVYSGSTYYAASVKGRFTISRDNSRNTLYLQMNSLRPEDTAIYYCSAHGGESDVWGQGTTVTVSS

SEQ ID NO: 988 - protein, 111 aa, synthetic construct
  REGION 1..111: note = source = /note="Description of Artificial Sequence: Synthetic polypeptide"
DIVMTQTPLSLSVTPGQPASISCKSSQSLLRNDGKTPLYWYLQKAGQPPQLLIYEVSNRFSGVPDRFSGSGSGTDFTLKISRVEAEDVGAYYCMQNIQFPSFGGGTKLEIK

SEQ ID NO: 989 - protein, 487 aa, synthetic construct
  REGION 1..487: note = source = /note="Description of Artificial Sequence: Synthetic polypeptide"
MALPVTALLLPLALLLHAARPEVQLLESGGGLVQPGGSLRLSCAVSGFALSNHGMSWVRRAPGKGLEWVSGIVYSGSTYYAASVKGRFTISRDNSRNTLYLQMNSLRPEDTAIYYCSAHGGESDVWGQGTTVTVSSASGGGGSGGRASGGGGSDIVMTQTPLSLSVTPGQPASISCKSSQSLLRNDGKTPLYWYLQKAGQPPQLLIYEVSNRFSGVPDRFSGSGSGTDFTLKISRVEAEDVGAYYCMQNIQFPSFGGGTKLEIKTTTPAPRPPTPAPTIASQPLSLRPEACRPAAGGAVHTRGLDFACDIYIWAPLAGTCGVLLLSLVITLYCKRGRKKLLYIFKQPFMRPVQTTQEEDGCSCRFPEEEEGGCELRVKFSRSADAPAYKQGQNQLYNELNLGRREEYDVLDKRRGRDPEMGGKPRRKNPQEGLYNELQKDKMAEAYSEIGMKGERRRGKGHDGLYQGLSTATKDTYDALHMQALPPR

SEQ ID NO: 990 - DNA, 1461 bp, synthetic construct
  misc_feature 1..1461: note = source = /note="Description of Artificial Sequence: Synthetic polynucleotide"
  source 1..1461: mol_type = other DNA
atggccctccctgtcaccgccctgctgcttccgctggctcttctgctccacgccgctcggcccgaagtgcaattgttggaatctggaggaggacttgtgcagcctggaggatcactgagactttcgtgtgcggtgtcaggcttcgccctgagcaaccacggcatgagctgggtgcggagagccccggggaagggtctggaatgggtgtccgggatcgtctactccggttcaacttactacgccgcaagcgtgaagggtcgcttcaccatttcccgcgataactcccggaacaccctgtacctccaaatgaactccctgcggcccgaggacaccgccatctactactgttccgcgcatggaggagagtccgatgtctggggacagggcactaccgtgaccgtgtcgagcgcctcggggggaggaggctccggcggtcgcgcctccggggggggtggcagcgacattgtgatgacgcagactccactctcgctgtccgtgaccccgggacagcccgcgtccatctcgtgcaagagctcccagagcctgctgaggaacgacggaaagactcctctgtattggtacctccagaaggctggacagcccccgcaactgctcatctacgaagtgtcaaatcgcttctccggggtgccggatcggttttccggctcgggatcgggcaccgacttcaccctgaaaatctccagggtcgaggccgaggacgtgggagcctactactgcatgcaaaacatccagttcccttccttcggcggcggcacaaagctggagattaagaccactaccccagcaccgaggccacccaccccggctcctaccatcgcctcccagcctctgtccctgcgtccggaggcatgtagacccgcagctggtggggccgtgcatacccggggtcttgacttcgcctgcgatatctacatttgggcccctctggctggtacttgcggggtcctgctgctttcactcgtgatcactctttactgtaagcgcggtcggaagaagctgctgtacatctttaagcaacccttcatgaggcctgtgcagactactcaagaggaggacggctgttcatgccggttcccagaggaggaggaaggcggctgcgaactgcgcgtgaaattcagccgcagcgcagatgctccagcctacaagcaggggcagaaccagctctacaacgaactcaatcttggtcggagagaggagtacgacgtgctggacaagcggagaggacgggacccagaaatgggcgggaagccgcgcagaaagaatccccaagagggcctgtacaacgagctccaaaaggataagatggcagaagcctatagcgagattggtatgaaaggggaacgcagaagaggcaaaggccacgacggactgtaccagggactcagcaccgccaccaaggacacctatgacgctcttcacatgcaggccctgccgcctcgg

SEQ ID NO: 991 - protein, 249 aa, synthetic construct
  REGION 1..249: note = source = /note="Description of Artificial Sequence: Synthetic polypeptide"
QVQLVQSGAEVRKTGASVKVSCKASGYIFDNFGINWVRQAPGQGLEWMGWINPKNNNTNYAQKFQGRVTITADESTNTAYMEVSSLRSEDTAVYYCARGPYYYQSYMDVWGQGTMVTVSSASGGGGSGGRASGGGGSDIVMTQTPLSLPVTPGEPASISCRSSQSLLHSNGYNYLNWYLQKPGQSPQLLIYLGSKRASGVPDRFSGSGSGTDFTLHITRVGAEDVGVYYCMQALQTPYTFGQGTKLEIK

SEQ ID NO: 992 - DNA, 747 bp, synthetic construct
  misc_feature 1..747: note = source = /note="Description of Artificial Sequence: Synthetic polynucleotide"
  source 1..747: mol_type = other DNA
caagtccaactcgtccagtccggcgcagaagtcagaaaaaccggtgctagcgtgaaagtgtcctgcaaggcctccggctacattttcgataacttcggaatcaactgggtcagacaggccccgggccaggggctggaatggatgggatggatcaaccccaagaacaacaacaccaactacgcacagaagttccagggccgcgtgactatcaccgccgatgaatcgaccaataccgcctacatggaggtgtcctccctgcggtcggaggacactgccgtgtattactgcgcgaggggcccatactactaccaaagctacatggacgtctggggacagggaaccatggtgaccgtgtcatccgcctccggtggtggaggctccggggggcgggcttcaggaggcggaggaagcgatattgtgatgacccagactccgcttagcctgcccgtgactcctggagaaccggcctccatttcctgccggtcctcgcaatcactcctgcattccaacggttacaactacctgaattggtacctccagaagcctggccagtcgccccagttgctgatctatctgggctcgaagcgcgcctccggggtgcctgaccggtttagcggatctgggagcggcacggacttcactctccacatcacccgcgtgggagcggaggacgtgggagtgtactactgtatgcaggcgctgcagactccgtacacattcggacagggcaccaagctggagatcaag

SEQ ID NO: 993 - protein, 120 aa, synthetic construct
  REGION 1..120: note = source = /note="Description of Artificial Sequence: Synthetic polypeptide"
QVQLVQSGAEVRKTGASVKVSCKASGYIFDNFGINWVRQAPGQGLEWMGWINPKNNNTNYAQKFQGRVTITADESTNTAYMEVSSLRSEDTAVYYCARGPYYYQSYMDVWGQGTMVTVSS

SEQ ID NO: 994 - protein, 112 aa, synthetic construct
  REGION 1..112: note = source = /note="Description of Artificial Sequence: Synthetic polypeptide"
DIVMTQTPLSLPVTPGEPASISCRSSQSLLHSNGYNYLNWYLQKPGQSPQLLIYLGSKRASGVPDRFSGSGSGTDFTLHITRVGAEDVGVYYCMQALQTPYTFGQGTKLEIK

SEQ ID NO: 995 - protein, 493 aa, synthetic construct
  REGION 1..493: note = source = /note="Description of Artificial Sequence: Synthetic polypeptide"
MALPVTALLLPLALLLHAARPQVQLVQSGAEVRKTGASVKVSCKASGYIFDNFGINWVRQAPGQGLEWMGWINPKNNNTNYAQKFQGRVTITADESTNTAYMEVSSLRSEDTAVYYCARGPYYYQSYMDVWGQGTMVTVSSASGGGGSGGRASGGGGSDIVMTQTPLSLPVTPGEPASISCRSSQSLLHSNGYNYLNWYLQKPGQSPQLLIYLGSKRASGVPDRFSGSGSGTDFTLHITRVGAEDVGVYYCMQALQTPYTFGQGTKLEIKTTTPAPRPPTPAPTIASQPLSLRPEACRPAAGGAVHTRGLDFACDIYIWAPLAGTCGVLLLSLVITLYCKRGRKKLLYIFKQPFMRPVQTTQEEDGCSCRFPEEEEGGCELRVKFSRSADAPAYKQGQNQLYNELNLGRREEYDVLDKRRGRDPEMGGKPRRKNPQEGLYNELQKDKMAEAYSEIGMKGERRRGKGHDGLYQGLSTATKDTYDALHMQALPPR

SEQ ID NO: 996 - DNA, 1479 bp, synthetic construct
  misc_feature 1..1479: note = source = /note="Description of Artificial Sequence: Synthetic polynucleotide"
  source 1..1479: mol_type = other DNA
atggccctccctgtcaccgccctgctgcttccgctggctcttctgctccacgccgctcggccccaagtccaactcgtccagtccggcgcagaagtcagaaaaaccggtgctagcgtgaaagtgtcctgcaaggcctccggctacattttcgataacttcggaatcaactgggtcagacaggccccgggccaggggctggaatggatgggatggatcaaccccaagaacaacaacaccaactacgcacagaagttccagggccgcgtgactatcaccgccgatgaatcgaccaataccgcctacatggaggtgtcctccctgcggtcggaggacactgccgtgtattactgcgcgaggggcccatactactaccaaagctacatggacgtctggggacagggaaccatggtgaccgtgtcatccgcctccggtggtggaggctccggggggcgggcttcaggaggcggaggaagcgatattgtgatgacccagactccgcttagcctgcccgtgactcctggagaaccggcctccatttcctgccggtcctcgcaatcactcctgcattccaacggttacaactacctgaattggtacctccagaagcctggccagtcgccccagttgctgatctatctgggctcgaagcgcgcctccggggtgcctgaccggtttagcggatctgggagcggcacggacttcactctccacatcacccgcgtgggagcggaggacgtgggagtgtactactgtatgcaggcgctgcagactccgtacacattcggacagggcaccaagctggagatcaagaccactaccccagcaccgaggccacccaccccggctcctaccatcgcctcccagcctctgtccctgcgtccggaggcatgtagacccgcagctggtggggccgtgcatacccggggtcttgacttcgcctgcgatatctacatttgggcccctctggctggtacttgcggggtcctgctgctttcactcgtgatcactctttactgtaagcgcggtcggaagaagctgctgtacatctttaagcaacccttcatgaggcctgtgcagactactcaagaggaggacggctgttcatgccggttcccagaggaggaggaaggcggctgcgaactgcgcgtgaaattcagccgcagcgcagatgctccagcctacaagcaggggcagaaccagctctacaacgaactcaatcttggtcggagagaggagtacgacgtgctggacaagcggagaggacgggacccagaaatgggcgggaagccgcgcagaaagaatccccaagagggcctgtacaacgagctccaaaaggataagatggcagaagcctatagcgagattggtatgaaaggggaacgcagaagaggcaaaggccacgacggactgtaccagggactcagcaccgccaccaaggacacctatgacgctcttcacatgcaggccctgccgcctcgg

SEQ ID NO: 997 - protein, 246 aa, synthetic construct
  REGION 1..246: note = source = /note="Description of Artificial Sequence: Synthetic polypeptide"
QVQLQESGGGLVQPGGSLRLSCAASGFTFSSDAMTWVRQAPGKGLEWVSVISGSGGTTYYADSVKGRFTISRDNSKNTLYLQMNSLRAEDTAVYYCAKLDSSGYYYARGPRYWGQGTLVTVSSASGGGGSGGRASGGGGSDIQLTQSPSSLSASVGDRVTITCRASQSISSYLNWYQQKPGKAPKLLIYGASTLASGVPARFSGSGSGTHFTLTINSLQSEDSATYYCQQSYKRASFGQGTKVEIK

SEQ ID NO: 998 - DNA, 738 bp, synthetic construct
  misc_feature 1..738: note = source = /note="Description of Artificial Sequence: Synthetic polynucleotide"
  source 1..738: mol_type = other DNA
caagtgcaacttcaagaatcaggcggaggactcgtgcagcccggaggatcattgcggctctcgtgcgccgcctcgggcttcaccttctcgagcgacgccatgacctgggtccgccaggccccggggaaggggctggaatgggtgtctgtgatttccggctccgggggaactacgtactacgccgattccgtgaaaggtcgcttcactatctcccgggacaacagcaagaacaccctttatctgcaaatgaattccctccgcgccgaggacaccgccgtgtactactgcgccaagctggactcctcgggctactactatgcccggggtccgagatactggggacagggaaccctcgtgaccgtgtcctccgcgtccggcggaggagggtcgggagggcgggcctccggcggcggcggttcggacatccagctgacccagtccccatcctcactgagcgcaagcgtgggcgacagagtcaccattacatgcagggcgtcccagagcatcagctcctacctgaactggtaccaacagaagcctggaaaggctcctaagctgttgatctacggggcttcgaccctggcatccggggtgcccgcgaggtttagcggaagcggtagcggcactcacttcactctgaccattaacagcctccagtccgaggattcagccacttactactgtcagcagtcctacaagcgggccagcttcggacagggcactaaggtcgagatcaag

SEQ ID NO: 999 - protein, 123 aa, synthetic construct
  REGION 1..123: note = source = /note="Description of Artificial Sequence: Synthetic polypeptide"
QVQLQESGGGLVQPGGSLRLSCAASGFTFSSDAMTWVRQAPGKGLEWVSVISGSGGTTYYADSVKGRFTISRDNSKNTLYLQMNSLRAEDTAVYYCAKLDSSGYYYARGPRYWGQGTLVTVSS

SEQ ID NO: 1000 - protein, 106 aa, synthetic construct
  REGION 1..106: note = source = /note="Description of Artificial Sequence: Synthetic polypeptide"
DIQLTQSPSSLSASVGDRVTITCRASQSISSYLNWYQQKPGKAPKLLIYGASTLASGVPARFSGSGSGTHFTLTINSLQSEDSATYYCQQSYKRASFGQGTKVEIK

SEQ ID NO: 1001 - protein, 490 aa, synthetic construct
  REGION 1..490: note = source = /note="Description of Artificial Sequence: Synthetic polypeptide"
MALPVTALLLPLALLLHAARPQVQLQESGGGLVQPGGSLRLSCAASGFTFSSDAMTWVRQAPGKGLEWVSVISGSGGTTYYADSVKGRFTISRDNSKNTLYLQMNSLRAEDTAVYYCAKLDSSGYYYARGPRYWGQGTLVTVSSASGGGGSGGRASGGGGSDIQLTQSPSSLSASVGDRVTITCRASQSISSYLNWYQQKPGKAPKLLIYGASTLASGVPARFSGSGSGTHFTLTINSLQSEDSATYYCQQSYKRASFGQGTKVEIKTTTPAPRPPTPAPTIASQPLSLRPEACRPAAGGAVHTRGLDFACDIYIWAPLAGTCGVLLLSLVITLYCKRGRKKLLYIFKQPFMRPVQTTQEEDGCSCRFPEEEEGGCELRVKFSRSADAPAYKQGQNQLYNELNLGRREEYDVLDKRRGRDPEMGGKPRRKNPQEGLYNELQKDKMAEAYSEIGMKGERRRGKGHDGLYQGLSTATKDTYDALHMQALPPR

SEQ ID NO: 1002 - DNA, 1470 bp, synthetic construct
  misc_feature 1..1470: note = source = /note="Description of Artificial Sequence: Synthetic polynucleotide"
  source 1..1470: mol_type = other DNA
atggccctccctgtcaccgccctgctgcttccgctggctcttctgctccacgccgctcggccccaagtgcaacttcaagaatcaggcggaggactcgtgcagcccggaggatcattgcggctctcgtgcgccgcctcgggcttcaccttctcgagcgacgccatgacctgggtccgccaggccccggggaaggggctggaatgggtgtctgtgatttccggctccgggggaactacgtactacgccgattccgtgaaaggtcgcttcactatctcccgggacaacagcaagaacaccctttatctgcaaatgaattccctccgcgccgaggacaccgccgtgtactactgcgccaagctggactcctcgggctactactatgcccggggtccgagatactggggacagggaaccctcgtgaccgtgtcctccgcgtccggcggaggagggtcgggagggcgggcctccggcggcggcggttcggacatccagctgacccagtccccatcctcactgagcgcaagcgtgggcgacagagtcaccattacatgcagggcgtcccagagcatcagctcctacctgaactggtaccaacagaagcctggaaaggctcctaagctgttgatctacggggcttcgaccctggcatccggggtgcccgcgaggtttagcggaagcggtagcggcactcacttcactctgaccattaacagcctccagtccgaggattcagccacttactactgtcagcagtcctacaagcgggccagcttcggacagggcactaaggtcgagatcaagaccactaccccagcaccgaggccacccaccccggctcctaccatcgcctcccagcctctgtccctgcgtccggaggcatgtagacccgcagctggtggggccgtgcatacccggggtcttgacttcgcctgcgatatctacatttgggcccctctggctggtacttgcggggtcctgctgctttcactcgtgatcactctttactgtaagcgcggtcggaagaagctgctgtacatctttaagcaacccttcatgaggcctgtgcagactactcaagaggaggacggctgttcatgccggttcccagaggaggaggaaggcggctgcgaactgcgcgtgaaattcagccgcagcgcagatgctccagcctacaagcaggggcagaaccagctctacaacgaactcaatcttggtcggagagaggagtacgacgtgctggacaagcggagaggacgggacccagaaatgggcgggaagccgcgcagaaagaatccccaagagggcctgtacaacgagctccaaaaggataagatggcagaagcctatagcgagattggtatgaaaggggaacgcagaagaggcaaaggccacgacggactgtaccagggactcagcaccgccaccaaggacacctatgacgctcttcacatgcaggccctgccgcctcgg

SEQ ID NO: 1003 - protein, 247 aa, synthetic construct
  REGION 1..247: note = source = /note="Description of Artificial Sequence: Synthetic polypeptide"
QVQLVQSGAEVKKPGASVKVSCKASGYTFSNYGITWVRQAPGQGLEWMGWISAYNGNTNYAQKFQGRVTMTRNTSISTAYMELSSLRSEDTAVYYCARGPYYYYMDVWGKGTMVTVSSASGGGGSGGRASGGGGSEIVMTQSPLSLPVTPGEPASISCRSSQSLLYSNGYNYVDWYLQKPGQSPQLLIYLGSNRASGVPDRFSGSGSGTDFKLQISRVEAEDVGIYYCMQGRQFPYSFGQGTKVEIK

SEQ ID NO: 1004 - DNA, 741 bp, synthetic construct
  misc_feature 1..741: note = source = /note="Description of Artificial Sequence: Synthetic polynucleotide"
  source 1..741: mol_type = other DNA
caagtccaactggtccagagcggtgcagaagtgaagaagcccggagcgagcgtgaaagtgtcctgcaaggcttccgggtacaccttctccaactacggcatcacttgggtgcgccaggccccgggacagggcctggaatggatggggtggatttccgcgtacaacggcaatacgaactacgctcagaagttccagggtagagtgaccatgactaggaacacctccatttccaccgcctacatggaactgtcctccctgcggagcgaggacaccgccgtgtactattgcgcccggggaccatactactactacatggatgtctgggggaaggggactatggtcaccgtgtcatccgcctcgggaggcggcggatcaggaggacgcgcctctggtggtggaggatcggagatcgtgatgacccagagccctctctccttgcccgtgactcctggggagcccgcatccatttcatgccggagctcccagtcacttctctactccaacggctataactacgtggattggtacctccaaaagccgggccagagcccgcagctgctgatctacctgggctcgaacagggccagcggagtgcctgaccggttctccgggtcgggaagcgggaccgacttcaagctgcaaatctcgagagtggaggccgaggacgtgggaatctactactgtatgcagggccgccagtttccgtactcgttcggacagggcaccaaagtggaaatcaag

SEQ ID NO: 1005 - protein, 118 aa, synthetic construct
  REGION 1..118: note = source = /note="Description of Artificial Sequence: Synthetic polypeptide"
QVQLVQSGAEVKKPGASVKVSCKASGYTFSNYGITWVRQAPGQGLEWMGWISAYNGNTNYAQKFQGRVTMTRNTSISTAYMELSSLRSEDTAVYYCARGPYYYYMDVWGKGTMVTVSS

SEQ ID NO: 1006 - protein, 112 aa, synthetic construct
  REGION 1..112: note = source = /note="Description of Artificial Sequence: Synthetic polypeptide"
EIVMTQSPLSLPVTPGEPASISCRSSQSLLYSNGYNYVDWYLQKPGQSPQLLIYLGSNRASGVPDRFSGSGSGTDFKLQISRVEAEDVGIYYCMQGRQFPYSFGQGTKVEIK

SEQ ID NO: 1007 - protein, 491 aa, synthetic construct
  REGION 1..491: note = source = /note="Description of Artificial Sequence: Synthetic polypeptide"
MALPVTALLLPLALLLHAARPQVQLVQSGAEVKKPGASVKVSCKASGYTFSNYGITWVRQAPGQGLEWMGWISAYNGNTNYAQKFQGRVTMTRNTSISTAYMELSSLRSEDTAVYYCARGPYYYYMDVWGKGTMVTVSSASGGGGSGGRASGGGGSEIVMTQSPLSLPVTPGEPASISCRSSQSLLYSNGYNYVDWYLQKPGQSPQLLIYLGSNRASGVPDRFSGSGSGTDFKLQISRVEAEDVGIYYCMQGRQFPYSFGQGTKVEIKTTTPAPRPPTPAPTIASQPLSLRPEACRPAAGGAVHTRGLDFACDIYIWAPLAGTCGVLLLSLVITLYCKRGRKKLLYIFKQPFMRPVQTTQEEDGCSCRFPEEEEGGCELRVKFSRSADAPAYKQGQNQLYNELNLGRREEYDVLDKRRGRDPEMGGKPRRKNPQEGLYNELQKDKMAEAYSEIGMKGERRRGKGHDGLYQGLSTATKDTYDALHMQALPPR

SEQ ID NO: 1008 - DNA, 1473 bp, synthetic construct
  misc_feature 1..1473: note = source = /note="Description of Artificial Sequence: Synthetic polynucleotide"
  source 1..1473: mol_type = other DNA
atggccctccctgtcaccgccctgctgcttccgctggctcttctgctccacgccgctcggccccaagtccaactggtccagagcggtgcagaagtgaagaagcccggagcgagcgtgaaagtgtcctgcaaggcttccgggtacaccttctccaactacggcatcacttgggtgcgccaggccccgggacagggcctggaatggatggggtggatttccgcgtacaacggcaatacgaactacgctcagaagttccagggtagagtgaccatgactaggaacacctccatttccaccgcctacatggaactgtcctccctgcggagcgaggacaccgccgtgtactattgcgcccggggaccatactactactacatggatgtctgggggaaggggactatggtcaccgtgtcatccgcctcgggaggcggcggatcaggaggacgcgcctctggtggtggaggatcggagatcgtgatgacccagagccctctctccttgcccgtgactcctggggagcccgcatccatttcatgccggagctcccagtcacttctctactccaacggctataactacgtggattggtacctccaaaagccgggccagagcccgcagctgctgatctacctgggctcgaacagggccagcggagtgcctgaccggttctccgggtcgggaagcgggaccgacttcaagctgcaaatctcgagagtggaggccgaggacgtgggaatctactactgtatgcagggccgccagtttccgtactcgttcggacagggcaccaaagtggaaatcaagaccactaccccagcaccgaggccacccaccccggctcctaccatcgcctcccagcctctgtccctgcgtccggaggcatgtagacccgcagctggtggggccgtgcatacccggggtcttgacttcgcctgcgatatctacatttgggcccctctggctggtacttgcggggtcctgctgctttcactcgtgatcactctttactgtaagcgcggtcggaagaagctgctgtacatctttaagcaacccttcatgaggcctgtgcagactactcaagaggaggacggctgttcatgccggttcccagaggaggaggaaggcggctgcgaactgcgcgtgaaattcagccgcagcgcagatgctccagcctacaagcaggggcagaaccagctctacaacgaactcaatcttggtcggagagaggagtacgacgtgctggacaagcggagaggacgggacccagaaatgggcgggaagccgcgcagaaagaatccccaagagggcctgtacaacgagctccaaaaggataagatggcagaagcctatagcgagattggtatgaaaggggaacgcagaagaggcaaaggccacgacggactgtaccagggactcagcaccgccaccaaggacacctatgacgctcttcacatgcaggccctgccgcctcgg

SEQ ID NO: 1009 - protein, 238 aa, synthetic construct
  REGION 1..238: note = source = /note="Description of Artificial Sequence: Synthetic polypeptide"
EVQLLETGGGLVQPGGSLRLSCAVSGFALSNHGMSWVRRAPGKGLEWVSGIVYSGSTYYAASVKGRFTISRDNSRNTLYLQMNSLRPEDTAIYYCSAHGGESDVWGQGTTVTVSSASGGGGSGGRASGGGGSEIVLTQSPATLSVSPGESATLSCRASQSVSSNLAWYQQKPGQAPRLLIYGASTRASGIPDRFSGSGSGTDFTLTISSLQAEDVAVYYCQQYGSSLTFGGGTKVEIK

SEQ ID NO: 1010 - DNA, 714 bp, synthetic construct
  misc_feature 1..714: note = source = /note="Description of Artificial Sequence: Synthetic polynucleotide"
  source 1..714: mol_type = other DNA
gaagtgcaattgctcgaaactggaggaggtctggtgcaacctggaggatcacttcgcctgtcctgcgccgtgtcgggctttgccctgtccaaccatggaatgagctgggtccgccgcgcgccggggaagggcctcgaatgggtgtccggcatcgtctactccggctccacctactacgccgcgtccgtgaagggccggttcacgatttcacgggacaactcgcggaacaccctgtacctccaaatgaattcccttcggccggaggatactgccatctactactgctccgcccacggtggcgaatccgacgtctggggccagggaaccaccgtgaccgtgtccagcgcgtccgggggaggaggaagcgggggtagagcatcgggtggaggcggatcagagatcgtgctgacccagtcccccgccaccttgagcgtgtcaccaggagagtccgccaccctgtcatgccgcgccagccagtccgtgtcctccaacctggcttggtaccagcagaagccggggcaggcccctagactcctgatctatggggcgtcgacccgggcatctggaattcccgataggttcagcggatcgggctcgggcactgacttcactctgaccatctcctcgctgcaagccgaggacgtggctgtgtactactgtcagcagtacggaagctccctgactttcggtggcgggaccaaagtcgagattaag

SEQ ID NO: 1011 - protein, 115 aa, synthetic construct
  REGION 1..115: note = source = /note="Description of Artificial Sequence: Synthetic polypeptide"
EVQLLETGGGLVQPGGSLRLSCAVSGFALSNHGMSWVRRAPGKGLEWVSGIVYSGSTYYAASVKGRFTISRDNSRNTLYLQMNSLRPEDTAIYYCSAHGGESDVWGQGTTVTVSS

SEQ ID NO: 1012 - protein, 106 aa, synthetic construct
  REGION 1..106: note = source = /note="Description of Artificial Sequence: Synthetic polypeptide"
EIVLTQSPATLSVSPGESATLSCRASQSVSSNLAWYQQKPGQAPRLLIYGASTRASGIPDRFSGSGSGTDFTLTISSLQAEDVAVYYCQQYGSSLTFGGGTKVEIK

SEQ ID NO: 1013 - protein, 482 aa, synthetic construct
  REGION 1..482: note = source = /note="Description of Artificial Sequence: Synthetic polypeptide"
MALPVTALLLPLALLLHAARPEVQLLETGGGLVQPGGSLRLSCAVSGFALSNHGMSWVRRAPGKGLEWVSGIVYSGSTYYAASVKGRFTISRDNSRNTLYLQMNSLRPEDTAIYYCSAHGGESDVWGQGTTVTVSSASGGGGSGGRASGGGGSEIVLTQSPATLSVSPGESATLSCRASQSVSSNLAWYQQKPGQAPRLLIYGASTRASGIPDRFSGSGSGTDFTLTISSLQAEDVAVYYCQQYGSSLTFGGGTKVEIKTTTPAPRPPTPAPTIASQPLSLRPEACRPAAGGAVHTRGLDFACDIYIWAPLAGTCGVLLLSLVITLYCKRGRKKLLYIFKQPFMRPVQTTQEEDGCSCRFPEEEEGGCELRVKFSRSADAPAYKQGQNQLYNELNLGRREEYDVLDKRRGRDPEMGGKPRRKNPQEGLYNELQKDKMAEAYSEIGMKGERRRGKGHDGLYQGLSTATKDTYDALHMQALPPR

SEQ ID NO: 1014 - DNA, 1446 bp, synthetic construct
  misc_feature 1..1446: note = source = /note="Description of Artificial Sequence: Synthetic polynucleotide"
  source 1..1446: mol_type = other DNA
atggccctccctgtcaccgccctgctgcttccgctggctcttctgctccacgccgctcggcccgaagtgcaattgctcgaaactggaggaggtctggtgcaacctggaggatcacttcgcctgtcctgcgccgtgtcgggctttgccctgtccaaccatggaatgagctgggtccgccgcgcgccggggaagggcctcgaatgggtgtccggcatcgtctactccggctccacctactacgccgcgtccgtgaagggccggttcacgatttcacgggacaactcgcggaacaccctgtacctccaaatgaattcccttcggccggaggatactgccatctactactgctccgcccacggtggcgaatccgacgtctggggccagggaaccaccgtgaccgtgtccagcgcgtccgggggaggaggaagcgggggtagagcatcgggtggaggcggatcagagatcgtgctgacccagtcccccgccaccttgagcgtgtcaccaggagagtccgccaccctgtcatgccgcgccagccagtccgtgtcctccaacctggcttggtaccagcagaagccggggcaggcccctagactcctgatctatggggcgtcgacccgggcatctggaattcccgataggttcagcggatcgggctcgggcactgacttcactctgaccatctcctcgctgcaagccgaggacgtggctgtgtactactgtcagcagtacggaagctccctgactttcggtggcgggaccaaagtcgagattaagaccactaccccagcaccgaggccacccaccccggctcctaccatcgcctcccagcctctgtccctgcgtccggaggcatgtagacccgcagctggtggggccgtgcatacccggggtcttgacttcgcctgcgatatctacatttgggcccctctggctggtacttgcggggtcctgctgctttcactcgtgatcactctttactgtaagcgcggtcggaagaagctgctgtacatctttaagcaacccttcatgaggcctgtgcagactactcaagaggaggacggctgttcatgccggttcccagaggaggaggaaggcggctgcgaactgcgcgtgaaattcagccgcagcgcagatgctccagcctacaagcaggggcagaaccagctctacaacgaactcaatcttggtcggagagaggagtacgacgtgctggacaagcggagaggacgggacccagaaatgggcgggaagccgcgcagaaagaatccccaagagggcctgtacaacgagctccaaaaggataagatggcagaagcctatagcgagattggtatgaaaggggaacgcagaagaggcaaaggccacgacggactgtaccagggactcagcaccgccaccaaggacacctatgacgctcttcacatgcaggccctgccgcctcgg

SEQ ID NO: 1015 - protein, 239 aa, synthetic construct
  REGION 1..239: note = source = /note="Description of Artificial Sequence: Synthetic polypeptide"
EVQLVETGGGLVQPGGSLRLSCAVSGFALSNHGMSWVRRAPGKGLEWVSGIVYSGSTYYAASVKGRFTISRDNSRNTLYLQMNSLRPEDTAIYYCSAHGGESDVWGQGTTVTVSSASGGGGSGGRASGGGGSEIVMTQSPATLSVSPGERATLSCRASQSVSSKLAWYQQKPGQAPRLLMYGASIRATGIPDRFSGSGSGTEFTLTISSLEPEDFAVYYCQQYGSSSWTFGQGTKVEIK

SEQ ID NO: 1016 - DNA, 717 bp, synthetic construct
  misc_feature 1..717: note = source = /note="Description of Artificial Sequence: Synthetic polynucleotide"
  source 1..717: mol_type = other DNA
gaagtgcaattggtggaaactggaggaggacttgtgcaacctggaggatcattgagactgagctgcgcagtgtcgggattcgccctgagcaaccatggaatgtcctgggtcagaagggcccctggaaaaggcctcgaatgggtgtcagggatcgtgtactccggttccacttactacgccgcctccgtgaaggggcgcttcactatctcacgggataactcccgcaataccctgtacctccaaatgaacagcctgcggccggaggataccgccatctactactgttccgcccacggtggagagtctgacgtctggggccagggaactaccgtgaccgtgtcctccgcgtccggcggtggagggagcggcggccgcgccagcggcggcggaggctccgagatcgtgatgacccagagccccgctactctgtcggtgtcgcccggagaaagggcgaccctgtcctgccgggcgtcgcagtccgtgagcagcaagctggcttggtaccagcagaagccgggccaggcaccacgcctgcttatgtacggtgcctccattcgggccaccggaatcccggaccggttctcggggtcggggtccggtaccgagttcacactgaccatttcctcgctcgagcccgaggactttgccgtctattactgccagcagtacggctcctcctcatggacgttcggccaggggaccaaggtcgaaatcaag

SEQ ID NO: 1017 - protein, 115 aa, synthetic construct
  REGION 1..115: note = source = /note="Description of Artificial Sequence: Synthetic polypeptide"
EVQLVETGGGLVQPGGSLRLSCAVSGFALSNHGMSWVRRAPGKGLEWVSGIVYSGSTYYAASVKGRFTISRDNSRNTLYLQMNSLRPEDTAIYYCSAHGGESDVWGQGTTVTVSS

SEQ ID NO: 1018 - protein, 107 aa, synthetic construct
  REGION 1..107: note = source = /note="Description of Artificial Sequence: Synthetic polypeptide"
EIVMTQSPATLSVSPGERATLSCRASQSVSSKLAWYQQKPGQAPRLLMYGASIRATGIPDRFSGSGSGTEFTLTISSLEPEDFAVYYCQQYGSSSWTFGQGTKVEIK

SEQ ID NO: 1019 - protein, 483 aa, synthetic construct
  REGION 1..483: note = source = /note="Description of Artificial Sequence: Synthetic polypeptide"
MALPVTALLLPLALLLHAARPEVQLVETGGGLVQPGGSLRLSCAVSGFALSNHGMSWVRRAPGKGLEWVSGIVYSGSTYYAASVKGRFTISRDNSRNTLYLQMNSLRPEDTAIYYCSAHGGESDVWGQGTTVTVSSASGGGGSGGRASGGGGSEIVMTQSPATLSVSPGERATLSCRASQSVSSKLAWYQQKPGQAPRLLMYGASIRATGIPDRFSGSGSGTEFTLTISSLEPEDFAVYYCQQYGSSSWTFGQGTKVEIKTTTPAPRPPTPAPTIASQPLSLRPEACRPAAGGAVHTRGLDFACDIYIWAPLAGTCGVLLLSLVITLYCKRGRKKLLYIFKQPFMRPVQTTQEEDGCSCRFPEEEEGGCELRVKFSRSADAPAYKQGQNQLYNELNLGRREEYDVLDKRRGRDPEMGGKPRRKNPQEGLYNELQKDKMAEAYSEIGMKGERRRGKGHDGLYQGLSTATKDTYDALHMQALPPR

SEQ ID NO: 1020 - DNA, 1449 bp, synthetic construct
  misc_feature 1..1449: note = source = /note="Description of Artificial Sequence: Synthetic polynucleotide"
  source 1..1449: mol_type = other DNA
atggccctccctgtcaccgccctgctgcttccgctggctcttctgctccacgccgctcggcccgaagtgcaattggtggaaactggaggaggacttgtgcaacctggaggatcattgagactgagctgcgcagtgtcgggattcgccctgagcaaccatggaatgtcctgggtcagaagggcccctggaaaaggcctcgaatgggtgtcagggatcgtgtactccggttccacttactacgccgcctccgtgaaggggcgcttcactatctcacgggataactcccgcaataccctgtacctccaaatgaacagcctgcggccggaggataccgccatctactactgttccgcccacggtggagagtctgacgtctggggccagggaactaccgtgaccgtgtcctccgcgtccggcggtggagggagcggcggccgcgccagcggcggcggaggctccgagatcgtgatgacccagagccccgctactctgtcggtgtcgcccggagaaagggcgaccctgtcctgccgggcgtcgcagtccgtgagcagcaagctggcttggtaccagcagaagccgggccaggcaccacgcctgcttatgtacggtgcctccattcgggccaccggaatcccggaccggttctcggggtcggggtccggtaccgagttcacactgaccatttcctcgctcgagcccgaggactttgccgtctattactgccagcagtacggctcctcctcatggacgttcggccaggggaccaaggtcgaaatcaagaccactaccccagcaccgaggccacccaccccggctcctaccatcgcctcccagcctctgtccctgcgtccggaggcatgtagacccgcagctggtggggccgtgcatacccggggtcttgacttcgcctgcgatatctacatttgggcccctctggctggtacttgcggggtcctgctgctttcactcgtgatcactctttactgtaagcgcggtcggaagaagctgctgtacatctttaagcaacccttcatgaggcctgtgcagactactcaagaggaggacggctgttcatgccggttcccagaggaggaggaaggcggctgcgaactgcgcgtgaaattcagccgcagcgcagatgctccagcctacaagcaggggcagaaccagctctacaacgaactcaatcttggtcggagagaggagtacgacgtgctggacaagcggagaggacgggacccagaaatgggcgggaagccgcgcagaaagaatccccaagagggcctgtacaacgagctccaaaaggataagatggcagaagcctatagcgagattggtatgaaaggggaacgcagaagaggcaaaggccacgacggactgtaccagggactcagcaccgccaccaaggacacctatgacgctcttcacatgcaggccctgccgcctcgg

SEQ ID NO: 1021 - protein, 241 aa, synthetic construct
  REGION 1..241: note = source = /note="Description of Artificial Sequence: Synthetic polypeptide"
EVQLVETGGGVVQPGGSLRLSCAVSGFALSNHGMSWVRRAPGKGLEWVSGIVYSGSTYYAASVKGRFTISRDNSRNTLYLQMNSLRPEDTAIYYCSAHGGESDVWGQGTTVTVSSASGGGGSGGRASGGGGSEIVLTQSPGTLSLSPGERATLSCRASQSVGSTNLAWYQQKPGQAPRLLIYDASNRATGIPDRFSGGGSGTDFTLTISRLEPEDFAVYYCQQYGSSPPWTFGQGTKVEIK

SEQ ID NO: 1022 - DNA, 723 bp, synthetic construct
  misc_feature 1..723: note = source = /note="Description of Artificial Sequence: Synthetic polynucleotide"
  source 1..723: mol_type = other DNA
gaagtgcaattggtggagactggaggaggagtggtgcaacctggaggaagcctgagactgtcatgcgcggtgtcgggcttcgccctctccaaccacggaatgtcctgggtccgccgggcccctgggaaaggacttgaatgggtgtccggcatcgtgtactcgggttccacctactacgcggcctcagtgaagggccggtttactattagccgcgacaactccagaaacacactgtacctccaaatgaactcgctgcggccggaagataccgctatctactactgctccgcccatgggggagagtcggacgtctggggacagggcaccactgtcactgtgtccagcgcttccggcggtggtggaagcgggggacgggcctcaggaggcggtggcagcgagattgtgctgacccagtcccccgggaccctgagcctgtccccgggagaaagggccaccctctcctgtcgggcatcccagtccgtggggtctactaaccttgcatggtaccagcagaagcccggccaggcccctcgcctgctgatctacgacgcgtccaatagagccaccggcatcccggatcgcttcagcggaggcggatcgggcaccgacttcaccctcaccatttcaaggctggaaccggaggacttcgccgtgtactactgccagcagtatggttcgtccccaccctggacgttcggccaggggactaaggtcgagatcaag

SEQ ID NO: 1023 - protein, 115 aa, synthetic construct
  REGION 1..115: note = source = /note="Description of Artificial Sequence: Synthetic polypeptide"
EVQLVETGGGVVQPGGSLRLSCAVSGFALSNHGMSWVRRAPGKGLEWVSGIVYSGSTYYAASVKGRFTISRDNSRNTLYLQMNSLRPEDTAIYYCSAHGGESDVWGQGTTVTVSS

SEQ ID NO: 1024 - protein, 109 aa, synthetic construct
  REGION 1..109: note = source = /note="Description of Artificial Sequence: Synthetic polypeptide"
EIVLTQSPGTLSLSPGERATLSCRASQSVGSTNLAWYQQKPGQAPRLLIYDASNRATGIPDRFSGGGSGTDFTLTISRLEPEDFAVYYCQQYGSSPPWTFGQGTKVEIK

SEQ ID NO: 1025 - protein, 485 aa, synthetic construct
  REGION 1..485: note = source = /note="Description of Artificial Sequence: Synthetic polypeptide"
MALPVTALLLPLALLLHAARPEVQLVETGGGVVQPGGSLRLSCAVSGFALSNHGMSWVRRAPGKGLEWVSGIVYSGSTYYAASVKGRFTISRDNSRNTLYLQMNSLRPEDTAIYYCSAHGGESDVWGQGTTVTVSSASGGGGSGGRASGGGGSEIVLTQSPGTLSLSPGERATLSCRASQSVGSTNLAWYQQKPGQAPRLLIYDASNRATGIPDRFSGGGSGTDFTLTISRLEPEDFAVYYCQQYGSSPPWTFGQGTKVEIKTTTPAPRPPTPAPTIASQPLSLRPEACRPAAGGAVHTRGLDFACDIYIWAPLAGTCGVLLLSLVITLYCKRGRKKLLYIFKQPFMRPVQTTQEEDGCSCRFPEEEEGGCELRVKFSRSADAPAYKQGQNQLYNELNLGRREEYDVLDKRRGRDPEMGGKPRRKNPQEGLYNELQKDKMAEAYSEIGMKGERRRGKGHDGLYQGLSTATKDTYDALHMQALPPR

SEQ ID NO: 1026 - DNA, 1455 bp, synthetic construct
  misc_feature 1..1455: note = source = /note="Description of Artificial Sequence: Synthetic polynucleotide"
  source 1..1455: mol_type = other DNA
atggccctccctgtcaccgccctgctgcttccgctggctcttctgctccacgccgctcggcccgaagtgcaattggtggagactggaggaggagtggtgcaacctggaggaagcctgagactgtcatgcgcggtgtcgggcttcgccctctccaaccacggaatgtcctgggtccgccgggcccctgggaaaggacttgaatgggtgtccggcatcgtgtactcgggttccacctactacgcggcctcagtgaagggccggtttactattagccgcgacaactccagaaacacactgtacctccaaatgaactcgctgcggccggaagataccgctatctactactgctccgcccatgggggagagtcggacgtctggggacagggcaccactgtcactgtgtccagcgcttccggcggtggtggaagcgggggacgggcctcaggaggcggtggcagcgagattgtgctgacccagtcccccgggaccctgagcctgtccccgggagaaagggccaccctctcctgtcgggcatcccagtccgtggggtctactaaccttgcatggtaccagcagaagcccggccaggcccctcgcctgctgatctacgacgcgtccaatagagccaccggcatcccggatcgcttcagcggaggcggatcgggcaccgacttcaccctcaccatttcaaggctggaaccggaggacttcgccgtgtactactgccagcagtatggttcgtccccaccctggacgttcggccaggggactaaggtcgagatcaagaccactaccccagcaccgaggccacccaccccggctcctaccatcgcctcccagcctctgtccctgcgtccggaggcatgtagacccgcagctggtggggccgtgcatacccggggtcttgacttcgcctgcgatatctacatttgggcccctctggctggtacttgcggggtcctgctgctttcactcgtgatcactctttactgtaagcgcggtcggaagaagctgctgtacatctttaagcaacccttcatgaggcctgtgcagactactcaagaggaggacggctgttcatgccggttcccagaggaggaggaaggcggctgcgaactgcgcgtgaaattcagccgcagcgcagatgctccagcctacaagcaggggcagaaccagctctacaacgaactcaatcttggtcggagagaggagtacgacgtgctggacaagcggagaggacgggacccagaaatgggcgggaagccgcgcagaaagaatccccaagagggcctgtacaacgagctccaaaaggataagatggcagaagcctatagcgagattggtatgaaaggggaacgcagaagaggcaaaggccacgacggactgtaccagggactcagcaccgccaccaaggacacctatgacgctcttcacatgcaggccctgccgcctcgg

SEQ ID NO: 1027 - protein, 239 aa, synthetic construct
  REGION 1..239: note = source = /note="Description of Artificial Sequence: Synthetic polypeptide"
QVQLVESGGGLVKPGGSLRLSCAASGFTFSDYYMSWIRQAPGKGLEWVSYISSSGSTIYYADSVKGRFTISRDNAKNSLYLQMNSLRAEDTAVYYCARESGDGMDVWGQGTTVTVSSASGGGGSGGRASGGGGSDIQMTQSPSSLSASVGDRVTITCRASQSISSYLNWYQQKPGKAPKLLIYAASSLQSGVPSRFSGSGSGTDFTLTISSLQPEDFATYYCQQSYTLAFGQGTKVDIK

SEQ ID NO: 1028 - DNA, 717 bp, synthetic construct
  misc_feature 1..717: note = source = /note="Description of Artificial Sequence: Synthetic polynucleotide"
  source 1..717: mol_type = other DNA
caagtgcaactcgtggaatctggtggaggactcgtgaaacctggaggatcattgagactgtcatgcgcggcctcgggattcacgttctccgattactacatgagctggattcgccaggctccggggaagggactggaatgggtgtcctacatttcctcatccggctccaccatctactacgcggactccgtgaaggggagattcaccattagccgcgataacgccaagaacagcctgtaccttcagatgaactccctgcgggctgaagatactgccgtctactactgcgcaagggagagcggagatgggatggacgtctggggacagggtaccactgtgaccgtgtcgtcggcctccggcggagggggttcgggtggaagggccagcggcggcggaggcagcgacatccagatgacccagtccccctcatcgctgtccgcctccgtgggcgaccgcgtcaccatcacatgccgggcctcacagtcgatctcctcctacctcaattggtatcagcagaagcccggaaaggcccctaagcttctgatctacgcagcgtcctccctgcaatccggggtcccatctcggttctccggctcgggcagcggtaccgacttcactctgaccatctcgagcctgcagccggaggacttcgccacttactactgtcagcaaagctacaccctcgcgtttggccagggcaccaaagtggacatcaag

SEQ ID NO: 1029 - protein, 117 aa, synthetic construct
  REGION 1..117: note = source = /note="Description of Artificial Sequence: Synthetic polypeptide"
QVQLVESGGGLVKPGGSLRLSCAASGFTFSDYYMSWIRQAPGKGLEWVSYISSSGSTIYYADSVKGRFTISRDNAKNSLYLQMNSLRAEDTAVYYCARESGDGMDVWGQGTTVTVSS

SEQ ID NO: 1030 - protein, 105 aa, synthetic construct
  REGION 1..105: note = source = /note="Description of Artificial Sequence: Synthetic polypeptide"
DIQMTQSPSSLSASVGDRVTITCRASQSISSYLNWYQQKPGKAPKLLIYAASSLQSGVPSRFSGSGSGTDFTLTISSLQPEDFATYYCQQSYTLAFGQGTKVDIK

SEQ ID NO: 1031 - protein, 483 aa, synthetic construct
  REGION 1..483: note = source = /note="Description of Artificial Sequence: Synthetic polypeptide"
MALPVTALLLPLALLLHAARPQVQLVESGGGLVKPGGSLRLSCAASGFTFSDYYMSWIRQAPGKGLEWVSYISSSGSTIYYADSVKGRFTISRDNAKNSLYLQMNSLRAEDTAVYYCARESGDGMDVWGQGTTVTVSSASGGGGSGGRASGGGGSDIQMTQSPSSLSASVGDRVTITCRASQSISSYLNWYQQKPGKAPKLLIYAASSLQSGVPSRFSGSGSGTDFTLTISSLQPEDFATYYCQQSYTLAFGQGTKVDIKTTTPAPRPPTPAPTIASQPLSLRPEACRPAAGGAVHTRGLDFACDIYIWAPLAGTCGVLLLSLVITLYCKRGRKKLLYIFKQPFMRPVQTTQEEDGCSCRFPEEEEGGCELRVKFSRSADAPAYKQGQNQLYNELNLGRREEYDVLDKRRGRDPEMGGKPRRKNPQEGLYNELQKDKMAEAYSEIGMKGERRRGKGHDGLYQGLSTATKDTYDALHMQALPPR

SEQ ID NO: 1032 - DNA, 1449 bp, synthetic construct
  misc_feature 1..1449: note = source = /note="Description of Artificial Sequence: Synthetic polynucleotide"
  source 1..1449: mol_type = other DNA
atggccctccctgtcaccgccctgctgcttccgctggctcttctgctccacgccgctcggccccaagtgcaactcgtggaatctggtggaggactcgtgaaacctggaggatcattgagactgtcatgcgcggcctcgggattcacgttctccgattactacatgagctggattcgccaggctccggggaagggactggaatgggtgtcctacatttcctcatccggctccaccatctactacgcggactccgtgaaggggagattcaccattagccgcgataacgccaagaacagcctgtaccttcagatgaactccctgcgggctgaagatactgccgtctactactgcgcaagggagagcggagatgggatggacgtctggggacagggtaccactgtgaccgtgtcgtcggcctccggcggagggggttcgggtggaagggccagcggcggcggaggcagcgacatccagatgacccagtccccctcatcgctgtccgcctccgtgggcgaccgcgtcaccatcacatgccgggcctcacagtcgatctcctcctacctcaattggtatcagcagaagcccggaaaggcccctaagcttctgatctacgcagcgtcctccctgcaatccggggtcccatctcggttctccggctcgggcagcggtaccgacttcactctgaccatctcgagcctgcagccggaggacttcgccacttactactgtcagcaaagctacaccctcgcgtttggccagggcaccaaagtggacatcaagaccactaccccagcaccgaggccacccaccccggctcctaccatcgcctcccagcctctgtccctgcgtccggaggcatgtagacccgcagctggtggggccgtgcatacccggggtcttgacttcgcctgcgatatctacatttgggcccctctggctggtacttgcggggtcctgctgctttcactcgtgatcactctttactgtaagcgcggtcggaagaagctgctgtacatctttaagcaacccttcatgaggcctgtgcagactactcaagaggaggacggctgttcatgccggttcccagaggaggaggaaggcggctgcgaactgcgcgtgaaattcagccgcagcgcagatgctccagcctacaagcaggggcagaaccagctctacaacgaactcaatcttggtcggagagaggagtacgacgtgctggacaagcggagaggacgggacccagaaatgggcgggaagccgcgcagaaagaatccccaagagggcctgtacaacgagctccaaaaggataagatggcagaagcctatagcgagattggtatgaaaggggaacgcagaagaggcaaaggccacgacggactgtaccagggactcagcaccgccaccaaggacacctatgacgctcttcacatgcaggccctgccgcctcgg

SEQ ID NO: 1033 - protein, 246 aa, synthetic construct
  REGION 1..246: note = source = /note="Description of Artificial Sequence: Synthetic polypeptide"
QVQLVQSGGGLVKPGGSLRLSCAASGFTFSDYYMSWIRQAPGKGLEWVSYISSSGNTIYYADSVKGRFTISRDNAKNSLYLQMNSLRAEDTAVYYCARSTMVREDYWGQGTLVTVSSASGGGGSGGRASGGGGSDIVLTQSPLSLPVTLGQPASISCKSSESLVHNSGKTYLNWFHQRPGQSPRRLIYEVSNRDSGVPDRFTGSGSGTDFTLKISRVEAEDVGVYYCMQGTHWPGTFGQGTKLEIK

SEQ ID NO: 1034 - DNA, 738 bp, synthetic construct
  misc_feature 1..738: note = source = /note="Description of Artificial Sequence: Synthetic polynucleotide"
  source 1..738: mol_type = other DNA
caagtgcaactggtgcaaagcggaggaggattggtcaaacccggaggaagcctgagactgtcatgcgcggcctctggattcaccttctccgattactacatgtcatggatcagacaggccccggggaagggcctcgaatgggtgtcctacatctcgtcctccgggaacaccatctactacgccgacagcgtgaagggccgctttaccatttcccgcgacaacgcaaagaactcgctgtaccttcagatgaattccctgcgggctgaagataccgcggtgtactattgcgcccggtccactatggtccgggaggactactggggacagggcacactcgtgaccgtgtccagcgcgagcgggggtggaggcagcggtggacgcgcctccggcggcggcggttcagacatcgtgctgactcagtcgcccctgtcgctgccggtcaccctgggccaaccggcctcaattagctgcaagtcctcggagagcctggtgcacaactcaggaaagacttacctgaactggttccatcagcggcctggacagtccccacggaggctcatctatgaagtgtccaacagggattcgggggtgcccgaccgcttcactggctccgggtccggcaccgacttcaccttgaaaatctccagagtggaagccgaggacgtgggcgtgtactactgtatgcagggtacccactggcctggaacctttggacaaggaactaagctcgagattaag

SEQ ID NO: 1035 - protein, 117 aa, synthetic construct
  REGION 1..117: note = source = /note="Description of Artificial Sequence: Synthetic polypeptide"
QVQLVQSGGGLVKPGGSLRLSCAASGFTFSDYYMSWIRQAPGKGLEWVSYISSSGNTIYYADSVKGRFTISRDNAKNSLYLQMNSLRAEDTAVYYCARSTMVREDYWGQGTLVTVSS

SEQ ID NO: 1036 - protein, 112 aa, synthetic construct
  REGION 1..112: note = source = /note="Description of Artificial Sequence: Synthetic polypeptide"
DIVLTQSPLSLPVTLGQPASISCKSSESLVHNSGKTYLNWFHQRPGQSPRRLIYEVSNRDSGVPDRFTGSGSGTDFTLKISRVEAEDVGVYYCMQGTHWPGTFGQGTKLEIK

SEQ ID NO: 1037 - protein, 490 aa, synthetic construct
  REGION 1..490: note = source = /note="Description of Artificial Sequence: Synthetic polypeptide"
MALPVTALLLPLALLLHAARPQVQLVQSGGGLVKPGGSLRLSCAASGFTFSDYYMSWIRQAPGKGLEWVSYISSSGNTIYYADSVKGRFTISRDNAKNSLYLQMNSLRAEDTAVYYCARSTMVREDYWGQGTLVTVSSASGGGGSGGRASGGGGSDIVLTQSPLSLPVTLGQPASISCKSSESLVHNSGKTYLNWFHQRPGQSPRRLIYEVSNRDSGVPDRFTGSGSGTDFTLKISRVEAEDVGVYYCMQGTHWPGTFGQGTKLEIKTTTPAPRPPTPAPTIASQPLSLRPEACRPAAGGAVHTRGLDFACDIYIWAPLAGTCGVLLLSLVITLYCKRGRKKLLYIFKQPFMRPVQTTQEEDGCSCRFPEEEEGGCELRVKFSRSADAPAYKQGQNQLYNELNLGRREEYDVLDKRRGRDPEMGGKPRRKNPQEGLYNELQKDKMAEAYSEIGMKGERRRGKGHDGLYQGLSTATKDTYDALHMQALPPR

SEQ ID NO: 1038 - DNA, 1470 bp, synthetic construct
  misc_feature 1..1470: note = source = /note="Description of Artificial Sequence: Synthetic polynucleotide"
  source 1..1470: mol_type = other DNA
atggccctccctgtcaccgccctgctgcttccgctggctcttctgctccacgccgctcggccccaagtgcaactggtgcaaagcggaggaggattggtcaaacccggaggaagcctgagactgtcatgcgcggcctctggattcaccttctccgattactacatgtcatggatcagacaggccccggggaagggcctcgaatgggtgtcctacatctcgtcctccgggaacaccatctactacgccgacagcgtgaagggccgctttaccatttcccgcgacaacgcaaagaactcgctgtaccttcagatgaattccctgcgggctgaagataccgcggtgtactattgcgcccggtccactatggtccgggaggactactggggacagggcacactcgtgaccgtgtccagcgcgagcgggggtggaggcagcggtggacgcgcctccggcggcggcggttcagacatcgtgctgactcagtcgcccctgtcgctgccggtcaccctgggccaaccggcctcaattagctgcaagtcctcggagagcctggtgcacaactcaggaaagacttacctgaactggttccatcagcggcctggacagtccccacggaggctcatctatgaagtgtccaacagggattcgggggtgcccgaccgcttcactggctccgggtccggcaccgacttcaccttgaaaatctccagagtggaagccgaggacgtgggcgtgtactactgtatgcagggtacccactggcctggaacctttggacaaggaactaagctcgagattaagaccactaccccagcaccgaggccacccaccccggctcctaccatcgcctcccagcctctgtccctgcgtccggaggcatgtagacccgcagctggtggggccgtgcatacccggggtcttgacttcgcctgcgatatctacatttgggcccctctggctggtacttgcggggtcctgctgctttcactcgtgatcactctttactgtaagcgcggtcggaagaagctgctgtacatctttaagcaacccttcatgaggcctgtgcagactactcaagaggaggacggctgttcatgccggttcccagaggaggaggaaggcggctgcgaactgcgcgtgaaattcagccgcagcgcagatgctccagcctacaagcaggggcagaaccagctctacaacgaactcaatcttggtcggagagaggagtacgacgtgctggacaagcggagaggacgggacccagaaatgggcgggaagccgcgcagaaagaatccccaagagggcctgtacaacgagctccaaaaggataagatggcagaagcctatagcgagattggtatgaaaggggaacgcagaagaggcaaaggccacgacggactgtaccagggactcagcaccgccaccaaggacacctatgacgctcttcacatgcaggccctgccgcctcgg

SEQ ID NO: 1039 - protein, 239 aa, synthetic construct
  REGION 1..239: note = source = /note="Description of Artificial Sequence: Synthetic polypeptide"
QVQLVESGGGLVQPGGSLRLSCAVSGFALSNHGMSWVRRAPGKGLEWVSGIVYSGSTYYAASVKGRFTISRDNSRNTLYLQMNSLRPEDTAIYYCSAHGGESDVWGQGTTVTVSSASGGGGSGGRASGGGGSDIRLTQSPSPLSASVGDRVTITCQASEDINKFLNWYHQTPGKAPKLLIYDASTLQTGVPSRFSGSGSGTDFTLTINSLQPEDIGTYYCQQYESLPLTFGGGTKVEIK

SEQ ID NO: 1040 - DNA, 717 bp, synthetic construct
  misc_feature 1..717: note = source = /note="Description of Artificial Sequence: Synthetic polynucleotide"
  source 1..717: mol_type = other DNA
caagtgcaactcgtggaatctggtggaggactcgtgcaacccggtggaagccttaggctgtcgtgcgccgtcagcgggtttgctctgagcaaccatggaatgtcctgggtccgccgggcaccgggaaaagggctggaatgggtgtccggcatcgtgtacagcgggtcaacctattacgccgcgtccgtgaagggcagattcactatctcaagagacaacagccggaacaccctgtacttgcaaatgaattccctgcgccccgaggacaccgccatctactactgctccgcccacggaggagagtcggacgtgtggggccagggaacgactgtgactgtgtccagcgcatcaggagggggtggttcgggcggccgggcctcggggggaggaggttccgacattcggctgacccagtccccgtccccactgtcggcctccgtcggcgaccgcgtgaccatcacttgtcaggcgtccgaggacattaacaagttcctgaactggtaccaccagacccctggaaaggcccccaagctgctgatctacgatgcctcgacccttcaaactggagtgcctagccggttctccgggtccggctccggcactgatttcactctgaccatcaactcattgcagccggaagatatcgggacctactattgccagcagtacgaatccctcccgctcacattcggcgggggaaccaaggtcgagattaag

SEQ ID NO: 1041 - protein, 115 aa, synthetic construct
  REGION 1..115: note = source = /note="Description of Artificial Sequence: Synthetic polypeptide"
QVQLVESGGGLVQPGGSLRLSCAVSGFALSNHGMSWVRRAPGKGLEWVSGIVYSGSTYYAASVKGRFTISRDNSRNTLYLQMNSLRPEDTAIYYCSAHGGESDVWGQGTTVTVSS

SEQ ID NO: 1042 - protein, 107 aa, synthetic construct
  REGION 1..107: note = source = /note="Description of Artificial Sequence: Synthetic polypeptide"
DIRLTQSPSPLSASVGDRVTITCQASEDINKFLNWYHQTPGKAPKLLIYDASTLQTGVPSRFSGSGSGTDFTLTINSLQPEDIGTYYCQQYESLPLTFGGGTKVEIK

SEQ ID NO: 1043 - protein, 483 aa, synthetic construct
  REGION 1..483: note = source = /note="Description of Artificial Sequence: Synthetic polypeptide"
MALPVTALLLPLALLLHAARPQVQLVESGGGLVQPGGSLRLSCAVSGFALSNHGMSWVRRAPGKGLEWVSGIVYSGSTYYAASVKGRFTISRDNSRNTLYLQMNSLRPEDTAIYYCSAHGGESDVWGQGTTVTVSSASGGGGSGGRASGGGGSDIRLTQSPSPLSASVGDRVTITCQASEDINKFLNWYHQTPGKAPKLLIYDASTLQTGVPSRFSGSGSGTDFTLTINSLQPEDIGTYYCQQYESLPLTFGGGTKVEIKTTTPAPRPPTPAPTIASQPLSLRPEACRPAAGGAVHTRGLDFACDIYIWAPLAGTCGVLLLSLVITLYCKRGRKKLLYIFKQPFMRPVQTTQEEDGCSCRFPEEEEGGCELRVKFSRSADAPAYKQGQNQLYNELNLGRREEYDVLDKRRGRDPEMGGKPRRKNPQEGLYNELQKDKMAEAYSEIGMKGERRRGKGHDGLYQGLSTATKDTYDALHMQALPPR

SEQ ID NO: 1044 - DNA, 1449 bp, synthetic construct
  misc_feature 1..1449: note = source = /note="Description of Artificial Sequence: Synthetic polynucleotide"
  source 1..1449: mol_type = other DNA
atggccctccctgtcaccgccctgctgcttccgctggctcttctgctccacgccgctcggccccaagtgcaactcgtggaatctggtggaggactcgtgcaacccggtggaagccttaggctgtcgtgcgccgtcagcgggtttgctctgagcaaccatggaatgtcctgggtccgccgggcaccgggaaaagggctggaatgggtgtccggcatcgtgtacagcgggtcaacctattacgccgcgtccgtgaagggcagattcactatctcaagagacaacagccggaacaccctgtacttgcaaatgaattccctgcgccccgaggacaccgccatctactactgctccgcccacggaggagagtcggacgtgtggggccagggaacgactgtgactgtgtccagcgcatcaggagggggtggttcgggcggccgggcctcggggggaggaggttccgacattcggctgacccagtccccgtccccactgtcggcctccgtcggcgaccgcgtgaccatcacttgtcaggcgtccgaggacattaacaagttcctgaactggtaccaccagacccctggaaaggcccccaagctgctgatctacgatgcctcgacccttcaaactggagtgcctagccggttctccgggtccggctccggcactgatttcactctgaccatcaactcattgcagccggaagatatcgggacctactattgccagcagtacgaatccctcccgctcacattcggcgggggaaccaaggtcgagattaagaccactaccccagcaccgaggccacccaccccggctcctaccatcgcctcccagcctctgtccctgcgtccggaggcatgtagacccgcagctggtggggccgtgcatacccggggtcttgacttcgcctgcgatatctacatttgggcccctctggctggtacttgcggggtcctgctgctttcactcgtgatcactctttactgtaagcgcggtcggaagaagctgctgtacatctttaagcaacccttcatgaggcctgtgcagactactcaagaggaggacggctgttcatgccggttcccagaggaggaggaaggcggctgcgaactgcgcgtgaaattcagccgcagcgcagatgctccagcctacaagcaggggcagaaccagctctacaacgaactcaatcttggtcggagagaggagtacgacgtgctggacaagcggagaggacgggacccagaaatgggcgggaagccgcgcagaaagaatccccaagagggcctgtacaacgagctccaaaaggataagatggcagaagcctatagcgagattggtatgaaaggggaacgcagaagaggcaaaggccacgacggactgtaccagggactcagcaccgccaccaaggacacctatgacgctcttcacatgcaggccctgccgcctcgg

SEQ ID NO: 1045 - protein, 240 aa, synthetic construct
  REGION 1..240: note = source = /note="Description of Artificial Sequence: Synthetic polypeptide"
EVQLVETGGGLVQPGGSLRLSCAVSGFALSNHGMSWVRRAPGKGLEWVSGIVYSGSTYYAASVKGRFTISRDNSRNTLYLQMNSLRPEDTAIYYCSAHGGESDVWGQGTTVTVSSASGGGGSGGRASGGGGSETTLTQSPATLSVSPGERATLSCRASQSVGSNLAWYQQKPGQGPRLLIYGASTRATGIPARFSGSGSGTEFTLTISSLQPEDFAVYYCQQYNDWLPVTFGQGTKVEIK

SEQ ID NO: 1046 - DNA, 720 bp, synthetic construct
  misc_feature 1..720: note = source = /note="Description of Artificial Sequence: Synthetic polynucleotide"
  source 1..720: mol_type = other DNA
gaagtgcaattggtggaaactggaggaggacttgtgcaacctggaggatcattgcggctctcatgcgctgtctccggcttcgccctgtcaaatcacgggatgtcgtgggtcagacgggccccgggaaagggtctggaatgggtgtcggggattgtgtacagcggctccacctactacgccgcttcggtcaagggccgcttcactatttcacgggacaacagccgcaacaccctctatctgcaaatgaactctctccgcccggaggataccgccatctactactgctccgcacacggcggcgaatccgacgtgtggggacagggaaccactgtcaccgtgtcgtccgcatccggtggcggaggatcgggtggccgggcctccgggggcggcggcagcgagactaccctgacccagtcccctgccactctgtccgtgagcccgggagagagagccacccttagctgccgggccagccagagcgtgggctccaacctggcctggtaccagcagaagccaggacagggtcccaggctgctgatctacggagcctccactcgcgcgaccggcatccccgcgaggttctccgggtcgggttccgggaccgagttcaccctgaccatctcctccctccaaccggaggacttcgcggtgtactactgtcagcagtacaacgattggctgcccgtgacatttggacaggggacgaaggtggaaatcaaa

SEQ ID NO: 1047 - protein, 115 aa, synthetic construct; identical to SEQ ID NO: 1017
  REGION 1..115: note = source = /note="Description of Artificial Sequence: Synthetic polypeptide"

SEQ ID NO: 1048 - protein, 108 aa, synthetic construct
  REGION 1..108: note = source = /note="Description of Artificial Sequence: Synthetic polypeptide"
ETTLTQSPATLSVSPGERATLSCRASQSVGSNLAWYQQKPGQGPRLLIYGASTRATGIPARFSGSGSGTEFTLTISSLQPEDFAVYYCQQYNDWLPVTFGQGTKVEIK

SEQ ID NO: 1049 - protein, 484 aa, synthetic construct
  REGION 1..484: note = source = /note="Description of Artificial Sequence: Synthetic polypeptide"
MALPVTALLLPLALLLHAARPEVQLVETGGGLVQPGGSLRLSCAVSGFALSNHGMSWVRRAPGKGLEWVSGIVYSGSTYYAASVKGRFTISRDNSRNTLYLQMNSLRPEDTAIYYCSAHGGESDVWGQGTTVTVSSASGGGGSGGRASGGGGSETTLTQSPATLSVSPGERATLSCRASQSVGSNLAWYQQKPGQGPRLLIYGASTRATGIPARFSGSGSGTEFTLTISSLQPEDFAVYYCQQYNDWLPVTFGQGTKVEIKTTTPAPRPPTPAPTIASQPLSLRPEACRPAAGGAVHTRGLDFACDIYIWAPLAGTCGVLLLSLVITLYCKRGRKKLLYIFKQPFMRPVQTTQEEDGCSCRFPEEEEGGCELRVKFSRSADAPAYKQGQNQLYNELNLGRREEYDVLDKRRGRDPEMGGKPRRKNPQEGLYNELQKDKMAEAYSEIGMKGERRRGKGHDGLYQGLSTATKDTYDALHMQALPPR

SEQ ID NO: 1050 - DNA, 1452 bp, synthetic construct
  misc_feature 1..1452: note = source = /note="Description of Artificial Sequence: Synthetic polynucleotide"
  source 1..1452: mol_type = other DNA
atggccctccctgtcaccgccctgctgcttccgctggctcttctgctccacgccgctcggcccgaagtgcaattggtggaaactggaggaggacttgtgcaacctggaggatcattgcggctctcatgcgctgtctccggcttcgccctgtcaaatcacgggatgtcgtgggtcagacgggccccgggaaagggtctggaatgggtgtcggggattgtgtacagcggctccacctactacgccgcttcggtcaagggccgcttcactatttcacgggacaacagccgcaacaccctctatctgcaaatgaactctctccgcccggaggataccgccatctactactgctccgcacacggcggcgaatccgacgtgtggggacagggaaccactgtcaccgtgtcgtccgcatccggtggcggaggatcgggtggccgggcctccgggggcggcggcagcgagactaccctgacccagtcccctgccactctgtccgtgagcccgggagagagagccacccttagctgccgggccagccagagcgtgggctccaacctggcctggtaccagcagaagccaggacagggtcccaggctgctgatctacggagcctccactcgcgcgaccggcatccccgcgaggttctccgggtcgggttccgggaccgagttcaccctgaccatctcctccctccaaccggaggacttcgcggtgtactactgtcagcagtacaacgattggctgcccgtgacatttggacaggggacgaaggtggaaatcaaaaccactaccccagcaccgaggccacccaccccggctcctaccatcgcctcccagcctctgtccctgcgtccggaggcatgtagacccgcagctggtggggccgtgcatacccggggtcttgacttcgcctgcgatatctacatttgggcccctctggctggtacttgcggggtcctgctgctttcactcgtgatcactctttactgtaagcgcggtcggaagaagctgctgtacatctttaagcaacccttcatgaggcctgtgcagactactcaagaggaggacggctgttcatgccggttcccagaggaggaggaaggcggctgcgaactgcgcgtgaaattcagccgcagcgcagatgctccagcctacaagcaggggcagaaccagctctacaacgaactcaatcttggtcggagagaggagtacgacgtgctggacaagcggagaggacgggacccagaaatgggcgggaagccgcgcagaaagaatccccaagagggcctgtacaacgagctccaaaaggataagatggcagaagcctatagcgagattggtatgaaaggggaacgcagaagaggcaaaggccacgacggactgtaccagggactcagcaccgccaccaaggacacctatgacgctcttcacatgcaggccctgccgcctcgg

SEQ ID NO: 1051 - protein, 241 aa, synthetic construct
  REGION 1..241: note = source = /note="Description of Artificial Sequence: Synthetic polypeptide"
EVQLVESGGGLVQPGGSLRLSCAVSGFALSNHGMSWVRRAPGKGLEWVSGIVYSGSTYYAASVKGRFTISRDNSRNTLYLQMNSLRPEDTAIYYCSAHGGESDVWGQGTTVTVSSASGGGGSGGRASGGGGSEIVLTQSPGTLSLSPGERATLSCRASQSIGSSSLAWYQQKPGQAPRLLMYGASSRASGIPDRFSGSGSGTDFTLTISRLEPEDFAVYYCQQYAGSPPFTFGQGTKVEIK

SEQ ID NO: 1052 - DNA, 723 bp, synthetic construct
  misc_feature 1..723: note = source = /note="Description of Artificial Sequence: Synthetic polynucleotide"
  source 1..723: mol_type = other DNA
gaagtgcaattggtggaatctggtggaggacttgtgcaacctggaggatcactgagactgtcatgcgcggtgtccggttttgccctgagcaatcatgggatgtcgtgggtccggcgcgcccccggaaagggtctggaatgggtgtcgggtatcgtctactccgggagcacttactacgccgcgagcgtgaagggccgcttcaccatttcccgcgataactcccgcaacaccctgtacttgcaaatgaactcgctccggcctgaggacactgccatctactactgctccgcacacggaggagaatccgacgtgtggggccagggaactaccgtgaccgtcagcagcgcctccggcggcgggggctcaggcggacgggctagcggcggcggtggctccgagatcgtgctgacccagtcgcctggcactctctcgctgagccccggggaaagggcaaccctgtcctgtcgggccagccagtccattggatcatcctccctcgcctggtatcagcagaaaccgggacaggctccgcggctgcttatgtatggggccagctcaagagcctccggcattcccgaccggttctccgggtccggttccggcaccgatttcaccctgactatctcgaggctggagccagaggacttcgccgtgtactactgccagcagtacgcggggtccccgccgttcacgttcggacagggaaccaaggtcgagatcaag

SEQ ID NO: 1053 - protein, 115 aa, synthetic construct; identical to SEQ ID NO: 969
  REGION 1..115: note = source = /note="Description of Artificial Sequence: Synthetic polypeptide"

SEQ ID NO: 1054 - protein, 109 aa, synthetic construct
  REGION 1..109: note = source = /note="Description of Artificial Sequence: Synthetic polypeptide"
EIVLTQSPGTLSLSPGERATLSCRASQSIGSSSLAWYQQKPGQAPRLLMYGASSRASGIPDRFSGSGSGTDFTLTISRLEPEDFAVYYCQQYAGSPPFTFGQGTKVEIK

SEQ ID NO: 1055 - protein, 485 aa, synthetic construct
  REGION 1..485: note = source = /note="Description of Artificial Sequence: Synthetic polypeptide"
MALPVTALLLPLALLLHAARPEVQLVESGGGLVQPGGSLRLSCAVSGFALSNHGMSWVRRAPGKGLEWVSGIVYSGSTYYAASVKGRFTISRDNSRNTLYLQMNSLRPEDTAIYYCSAHGGESDVWGQGTTVTVSSASGGGGSGGRASGGGGSEIVLTQSPGTLSLSPGERATLSCRASQSIGSSSLAWYQQKPGQAPRLLMYGASSRASGIPDRFSGSGSGTDFTLTISRLEPEDFAVYYCQQYAGSPPFTFGQGTKVEIKTTTPAPRPPTPAPTIASQPLSLRPEACRPAAGGAVHTRGLDFACDIYIWAPLAGTCGVLLLSLVITLYCKRGRKKLLYIFKQPFMRPVQTTQEEDGCSCRFPEEEEGGCELRVKFSRSADAPAYKQGQNQLYNELNLGRREEYDVLDKRRGRDPEMGGKPRRKNPQEGLYNELQKDKMAEAYSEIGMKGERRRGKGHDGLYQGLSTATKDTYDALHMQALPPR

SEQ ID NO: 1056 - DNA, 1455 bp, synthetic construct
  misc_feature 1..1455: note = source = /note="Description of Artificial Sequence: Synthetic polynucleotide"
  source 1..1455: mol_type = other DNA
atggccctccctgtcaccgccctgctgcttccgctggctcttctgctccacgccgctcggcccgaagtgcaattggtggaatctggtggaggacttgtgcaacctggaggatcactgagactgtcatgcgcggtgtccggttttgccctgagcaatcatgggatgtcgtgggtccggcgcgcccccggaaagggtctggaatgggtgtcgggtatcgtctactccgggagcacttactacgccgcgagcgtgaagggccgcttcaccatttcccgcgataactcccgcaacaccctgtacttgcaaatgaactcgctccggcctgaggacactgccatctactactgctccgcacacggaggagaatccgacgtgtggggccagggaactaccgtgaccgtcagcagcgcctccggcggcgggggctcaggcggacgggctagcggcggcggtggctccgagatcgtgctgacccagtcgcctggcactctctcgctgagccccggggaaagggcaaccctgtcctgtcgggccagccagtccattggatcatcctccctcgcctggtatcagcagaaaccgggacaggctccgcggctgcttatgtatggggccagctcaagagcctccggcattcccgaccggttctccgggtccggttccggcaccgatttcaccctgactatctcgaggctggagccagaggacttcgccgtgtactactgccagcagtacgcggggtccccgccgttcacgttcggacagggaaccaaggtcgagatcaagaccactaccccagcaccgaggccacccaccccggctcctaccatcgcctcccagcctctgtccctgcgtccggaggcatgtagacccgcagctggtggggccgtgcatacccggggtcttgacttcgcctgcgatatctacatttgggcccctctggctggtacttgcggggtcctgctgctttcactcgtgatcactctttactgtaagcgcggtcggaagaagctgctgtacatctttaagcaacccttcatgaggcctgtgcagactactcaagaggaggacggctgttcatgccggttcccagaggaggaggaaggcggctgcgaactgcgcgtgaaattcagccgcagcgcagatgctccagcctacaagcaggggcagaaccagctctacaacgaactcaatcttggtcggagagaggagtacgacgtgctggacaagcggagaggacgggacccagaaatgggcgggaagccgcgcagaaagaatccccaagagggcctgtacaacgagctccaaaaggataagatggcagaagcctatagcgagattggtatgaaaggggaacgcagaagaggcaaaggccacgacggactgtaccagggactcagcaccgccaccaaggacacctatgacgctcttcacatgcaggccctgccgcctcgg

SEQ ID NO: 1057 - protein, 243 aa, synthetic construct
  REGION 1..243: note = source = /note="Description of Artificial Sequence: Synthetic polypeptide"
QVQLQESGPGLVKPSETLSLTCTVSGGSISSSYYYWGWIRQPPGKGLEWIGSIYYSGSAYYNPSLKSRVTISVDTSKNQFSLRLSSVTAADTAVYYCARHWQEWPDAFDIWGQGTMVTVSSGGGGSGGGGSGGGGSETTLTQSPAFMSATPGDKVIISCKASQDIDDAMNWYQQKPGEAPLFIIQSATSPVPGIPPRFSGSGFGTDFSLTINNIESEDAAYYFCLQHDNFPLTFGQGTKLEIK

SEQ ID NO: 1058 - DNA, 729 bp, synthetic construct
  misc_feature 1..729: note = source = /note="Description of Artificial Sequence: Synthetic polynucleotide"
  source 1..729: mol_type = other DNA
caagtgcagcttcaggaaagcggaccgggcctggtcaagccatccgaaactctctccctgacttgcactgtgtctggcggttccatctcatcgtcgtactactactggggctggattaggcagccgcccggaaagggactggagtggatcggaagcatctactattccggctcggcgtactacaaccctagcctcaagtcgagagtgaccatctccgtggatacctccaagaaccagttttccctgcgcctgagctccgtgaccgccgctgacaccgccgtgtactactgtgctcggcattggcaggaatggcccgatgccttcgacatttggggccagggcactatggtcactgtgtcatccgggggtggaggcagcgggggaggagggtccggggggggaggttcagagacaaccttgacccagtcacccgcattcatgtccgccactccgggagacaaggtcatcatctcgtgcaaagcgtcccaggatatcgacgatgccatgaattggtaccagcagaagcctggcgaagcgccgctgttcattatccaatccgcaacctcgcccgtgcctggaatcccaccgcggttcagcggcagcggtttcggaaccgacttttccctgaccattaacaacattgagtccgaggacgccgcctactacttctgcctgcaacacgacaacttccctctcacgttcggccagggaaccaagctggaaatcaag

SEQ ID NO: 1059 - protein, 121 aa, synthetic construct
  REGION 1..121: note = source = /note="Description of Artificial Sequence: Synthetic polypeptide"
QVQLQESGPGLVKPSETLSLTCTVSGGSISSSYYYWGWIRQPPGKGLEWIGSIYYSGSAYYNPSLKSRVTISVDTSKNQFSLRLSSVTAADTAVYYCARHWQEWPDAFDIWGQGTMVTVSS

SEQ ID NO: 1060 - protein, 107 aa, synthetic construct
  REGION 1..107: note = source = /note="Description of Artificial Sequence: Synthetic polypeptide"
ETTLTQSPAFMSATPGDKVIISCKASQDIDDAMNWYQQKPGEAPLFIIQSATSPVPGIPPRFSGSGFGTDFSLTINNIESEDAAYYFCLQHDNFPLTFGQGTKLEIK

SEQ ID NO: 1061 - protein, 487 aa, synthetic construct
  REGION 1..487: note = source = /note="Description of Artificial Sequence: Synthetic polypeptide"
MALPVTALLLPLALLLHAARPQVQLQESGPGLVKPSETLSLTCTVSGGSISSSYYYWGWIRQPPGKGLEWIGSIYYSGSAYYNPSLKSRVTISVDTSKNQFSLRLSSVTAADTAVYYCARHWQEWPDAFDIWGQGTMVTVSSGGGGSGGGGSGGGGSETTLTQSPAFMSATPGDKVIISCKASQDIDDAMNWYQQKPGEAPLFIIQSATSPVPGIPPRFSGSGFGTDFSLTINNIESEDAAYYFCLQHDNFPLTFGQGTKLEIKTTTPAPRPPTPAPTIASQPLSLRPEACRPAAGGAVHTRGLDFACDIYIWAPLAGTCGVLLLSLVITLYCKRGRKKLLYIFKQPFMRPVQTTQEEDGCSCRFPEEEEGGCELRVKFSRSADAPAYKQGQNQLYNELNLGRREEYDVLDKRRGRDPEMGGKPRRKNPQEGLYNELQKDKMAEAYSEIGMKGERRRGKGHDGLYQGLSTATKDTYDALHMQALPPR

SEQ ID NO: 1062 - DNA, 1461 bp, synthetic construct
  misc_feature 1..1461: note = source = /note="Description of Artificial Sequence: Synthetic polynucleotide"
  source 1..1461: mol_type = other DNA
atggccctccctgtcaccgccctgctgcttccgctggctcttctgctccacgccgctcggccccaagtgcagcttcaggaaagcggaccgggcctggtcaagccatccgaaactctctccctgacttgcactgtgtctggcggttccatctcatcgtcgtactactactggggctggattaggcagccgcccggaaagggactggagtggatcggaagcatctactattccggctcggcgtactacaaccctagcctcaagtcgagagtgaccatctccgtggatacctccaagaaccagttttccctgcgcctgagctccgtgaccgccgctgacaccgccgtgtactactgtgctcggcattggcaggaatggcccgatgccttcgacatttggggccagggcactatggtcactgtgtcatccgggggtggaggcagcgggggaggagggtccggggggggaggttcagagacaaccttgacccagtcacccgcattcatgtccgccactccgggagacaaggtcatcatctcgtgcaaagcgtcccaggatatcgacgatgccatgaattggtaccagcagaagcctggcgaagcgccgctgttcattatccaatccgcaacctcgcccgtgcctggaatcccaccgcggttcagcggcagcggtttcggaaccgacttttccctgaccattaacaacattgagtccgaggacgccgcctactacttctgcctgcaacacgacaacttccctctcacgttcggccagggaaccaagctggaaatcaagaccactaccccagcaccgaggccacccaccccggctcctaccatcgcctcccagcctctgtccctgcgtccggaggcatgtagacccgcagctggtggggccgtgcatacccggggtcttgacttcgcctgcgatatctacatttgggcccctctggctggtacttgcggggtcctgctgctttcactcgtgatcactctttactgtaagcgcggtcggaagaagctgctgtacatctttaagcaacccttcatgaggcctgtgcagactactcaagaggaggacggctgttcatgccggttcccagaggaggaggaaggcggctgcgaactgcgcgtgaaattcagccgcagcgcagatgctccagcctacaagcaggggcagaaccagctctacaacgaactcaatcttggtcggagagaggagtacgacgtgctggacaagcggagaggacgggacccagaaatgggcgggaagccgcgcagaaagaatccccaagagggcctgtacaacgagctccaaaaggataagatggcagaagcctatagcgagattggtatgaaaggggaacgcagaagaggcaaaggccacgacggactgtaccagggactcagcaccgccaccaaggacacctatgacgctcttcacatgcaggccctgccgcctcgg

SEQ ID NO: 1063 - protein, 244 aa, synthetic construct
  REGION 1..244: note = source = /note="Description of Artificial Sequence: Synthetic polypeptide"
VNLRESGPALVKPTQTLTLTCTFSGFSLRTSGMCVSWIRQPPGKALEWLARIDWDEDKFYSTSLKTRLTISKDTSDNQVVLRMTNMDPADTATYYCARSGAGGTSATAFDIWGPGTMVTVSSGGGGSGGGGSGGGGSDIQMTQSPSSLSASVGDRVTITCRASQDIYNNLAWFQLKPGSAPRSLMYAANKSQSGVPSRFSGSASGTDFTLTISSLQPEDFATYYCQHYYRFPYSFGQGTKLEIK

SEQ ID NO: 1064 - DNA, 735 bp, synthetic construct
  misc_feature 1..735: note = source = /note="Description of Artificial Sequence: Synthetic polynucleotide"
  source 1..735: mol_type = other DNA
caagtcaatctgcgcgaatccggccccgccttggtcaagcctacccagaccctcactctgacctgtactttctccggcttctccctgcggacttccgggatgtgcgtgtcctggatcagacagcctccgggaaaggccctggagtggctcgctcgcattgactgggatgaggacaagttctactccacctcactcaagaccaggctgaccatcagcaaagatacctctgacaaccaagtggtgctccgcatgaccaacatggacccagccgacactgccacttactactgcgcgaggagcggagcgggcggaacctccgccaccgccttcgatatttggggcccgggtaccatggtcaccgtgtcaagcggaggaggggggtccgggggcggcggttccgggggaggcggatcggacattcagatgactcagtcaccatcgtccctgagcgctagcgtgggcgacagagtgacaatcacttgccgggcatcccaggacatctataacaaccttgcgtggttccagctgaagcctggttccgcaccgcggtcacttatgtacgccgccaacaagagccagtcgggagtgccgtcccggttttccggttcggcctcgggaactgacttcaccctgacgatctccagcctgcaacccgaggatttcgccacctactactgccagcactactaccgctttccctactcgttcggacagggaaccaagctggaaatcaag

SEQ ID NO: 1065 - protein, 123 aa, synthetic construct
  REGION 1..123: note = source = /note="Description of Artificial Sequence: Synthetic polypeptide"
QVNLRESGPALVKPTQTLTLTCTFSGFSLRTSGMCVSWIRQPPGKALEWLARIDWDEDKFYSTSLKTRLTISKDTSDNQVVLRMTNMDPADTATYYCARSGAGGTSATAFDIWGPGTMVTVSS

SEQ ID NO: 1066 - protein, 107 aa, synthetic construct
  REGION 1..107: note = source = /note="Description of Artificial Sequence: Synthetic polypeptide"
DIQMTQSPSSLSASVGDRVTITCRASQDIYNNLAWFQLKPGSAPRSLMYAANKSQSGVPSRFSGSASGTDFTLTISSLQPEDFATYYCQHYYRFPYSFGQGTKLEIK

SEQ ID NO: 1067 - protein, 489 aa, synthetic construct
  REGION 1..489: note = source = /note="Description of Artificial Sequence: Synthetic polypeptide"
MALPVTALLLPLALLLHAARPQVNLRESGPALVKPTQTLTLTCTFSGFSLRTSGMCVSWIRQPPGKALEWLARIDWDEDKFYSTSLKTRLTISKDTSDNQVVLRMTNMDPADTATYYCARSGAGGTSATAFDIWGPGTMVTVSSGGGGSGGGGSGGGGSDIQMTQSPSSLSASVGDRVTITCRASQDIYNNLAWFQLKPGSAPRSLMYAANKSQSGVPSRFSGSASGTDFTLTISSLQPEDFATYYCQHYYRFPYSFGQGTKLEIKTTTPAPRPPTPAPTIASQPLSLRPEACRPAAGGAVHTRGLDFACDIYIWAPLAGTCGVLLLSLVITLYCKRGRKKLLYIFKQPFMRPVQTTQEEDGCSCRFPEEEEGGCELRVKFSRSADAPAYKQGQNQLYNELNLGRREEYDVLDKRRGRDPEMGGKPRRKNPQEGLYNELQKDKMAEAYSEIGMKGERRRGKGHDGLYQGLSTATKDTYDALHMQALPPR

SEQ ID NO: 1068 - DNA, 1467 bp, synthetic construct
  misc_feature 1..1467: note = source = /note="Description of Artificial Sequence: Synthetic polynucleotide"
  source 1..1467: mol_type = other DNA
atggccctccctgtcaccgccctgctgcttccgctggctcttctgctccacgccgctcggccccaagtcaatctgcgcgaatccggccccgccttggtcaagcctacccagaccctcactctgacctgtactttctccggcttctccctgcggacttccgggatgtgcgtgtcctggatcagacagcctccgggaaaggccctggagtggctcgctcgcattgactgggatgaggacaagttctactccacctcactcaagaccaggctgaccatcagcaaagatacctctgacaaccaagtggtgctccgcatgaccaacatggacccagccgacactgccacttactactgcgcgaggagcggagcgggcggaacctccgccaccgccttcgatatttggggcccgggtaccatggtcaccgtgtcaagcggaggaggggggtccgggggcggcggttccgggggaggcggatcggacattcagatgactcagtcaccatcgtccctgagcgctagcgtgggcgacagagtgacaatcacttgccgggcatcccaggacatctataacaaccttgcgtggttccagctgaagcctggttccgcaccgcggtcacttatgtacgccgccaacaagagccagtcgggagtgccgtcccggttttccggttcggcctcgggaactgacttcaccctgacgatctccagcctgcaacccgaggatttcgccacctactactgccagcactactaccgctttccctactcgttcggacagggaaccaagctggaaatcaagaccactaccccagcaccgaggccacccaccccggctcctaccatcgcctcccagcctctgtccctgcgtccggaggcatgtagacccgcagctggtggggccgtgcatacccggggtcttgacttcgcctgcgatatctacatttgggcccctctggctggtacttgcggggtcctgctgctttcactcgtgatcactctttactgtaagcgcggtcggaagaagctgctgtacatctttaagcaacccttcatgaggcctgtgcagactactcaagaggaggacggctgttcatgccggttcccagaggaggaggaaggcggctgcgaactgcgcgtgaaattcagccgcagcgcagatgctccagcctacaagcaggggcagaaccagctctacaacgaactcaatcttggtcggagagaggagtacgacgtgctggacaagcggagaggacgggacccagaaatgggcgggaagccgcgcagaaagaatccccaagagggcctgtacaacgagctccaaaaggataagatggcagaagcctatagcgagattggtatgaaaggggaacgcagaagaggcaaaggccacgacggactgtaccagggactcagcaccgccaccaaggacacctatgacgctcttcacatgcaggccctgccgcctcgg

SEQ ID NO: 1069 - protein, 246 aa, synthetic construct
  REGION 1..246: note = source = /note="Description of Artificial Sequence: Synthetic polypeptide"
EVQLVESGGGLVKPGGSLRLSCAASGFTFSSYSMNWVRQAPGKGLEWVSSISSSSSYIYYADSVKGRFTISRDNAKNSLYLQMNSLRAEDTAVYYCAKTIAAVYAFDIWGQGTTVTVSSGGGGSGGGGSGGGGSEIVLTQSPLSLPVTPEEPASISCRSSQSLLHSNGYNYLDWYLQKPGQSPQLLIYLGSNRASGVPDRFSGSGSGTDFTLKISRVEAEDVGVYYCMQALQTPYTFGQGTKLEIK

SEQ ID NO: 1070 - DNA, 738 bp, synthetic construct
  misc_feature 1..738: note = source = /note="Description of Artificial Sequence: Synthetic polynucleotide"
  source 1..738: mol_type = other DNA
gaagtgcagcttgtcgaatccggggggggactggtcaagccgggcggatcactgagactgtcctgcgccgcgagcggcttcacgttctcctcctactccatgaactgggtccgccaagcccccgggaagggactggaatgggtgtcctctatctcctcgtcgtcgtcctacatctactacgccgactccgtgaagggaagattcaccatttcccgcgacaacgcaaagaactcactgtacttgcaaatgaactcactccgggccgaagatactgctgtgtactattgcgccaagactattgccgccgtctacgctttcgacatctggggccagggaaccaccgtgactgtgtcgtccggtggtggtggctcgggcggaggaggaagcggcggcggggggtccgagattgtgctgacccagtcgccactgagcctccctgtgacccccgaggaacccgccagcatcagctgccggtccagccagtccctgctccactccaacggatacaattacctcgattggtaccttcagaagcctggacaaagcccgcagctgctcatctacttgggatcaaaccgcgcgtcaggagtgcctgaccggttctccggctcgggcagcggtaccgatttcaccctgaaaatctccagggtggaggcagaggacgtgggagtgtattactgtatgcaggcgctgcagactccgtacacatttgggcagggcaccaagctggagatcaag

SEQ ID NO: 1071 - protein, 119 aa, synthetic construct
  REGION 1..119: note = source = /note="Description of Artificial Sequence: Synthetic polypeptide"
EVQLVESGGGLVKPGGSLRLSCAASGFTFSSYSMNWVRQAPGKGLEWVSSISSSSSYIYYADSVKGRFTISRDNAKNSLYLQMNSLRAEDTAVYYCAKTIAAVYAFDIWGQGTTVTVSS

SEQ ID NO: 1072 - protein, 112 aa, synthetic construct
  REGION 1..112: note = source = /note="Description of Artificial Sequence: Synthetic polypeptide"
EIVLTQSPLSLPVTPEEPASISCRSSQSLLHSNGYNYLDWYLQKPGQSPQLLIYLGSNRASGVPDRFSGSGSGTDFTLKISRVEAEDVGVYYCMQALQTPYTFGQGTKLEIK

SEQ ID NO: 1073 - protein, 490 aa, synthetic construct
  REGION 1..490: note = source = /note="Description of Artificial Sequence: Synthetic polypeptide"
MALPVTALLLPLALLLHAARPEVQLVESGGGLVKPGGSLRLSCAASGFTFSSYSMNWVRQAPGKGLEWVSSISSSSSYIYYADSVKGRFTISRDNAKNSLYLQMNSLRAEDTAVYYCAKTIAAVYAFDIWGQGTTVTVSSGGGGSGGGGSGGGGSEIVLTQSPLSLPVTPEEPASISCRSSQSLLHSNGYNYLDWYLQKPGQSPQLLIYLGSNRASGVPDRFSGSGSGTDFTLKISRVEAEDVGVYYCMQALQTPYTFGQGTKLEIKTTTPAPRPPTPAPTIASQPLSLRPEACRPAAGGAVHTRGLDFACDIYIWAPLAGTCGVLLLSLVITLYCKRGRKKLLYIFKQPFMRPVQTTQEEDGCSCRFPEEEEGGCELRVKFSRSADAPAYKQGQNQLYNELNLGRREEYDVLDKRRGRDPEMGGKPRRKNPQEGLYNELQKDKMAEAYSEIGMKGERRRGKGHDGLYQGLSTATKDTYDALHMQALPPR

SEQ ID NO: 1074 - DNA, 1470 bp, synthetic construct
  misc_feature 1..1470: note = source = /note="Description of Artificial Sequence: Synthetic polynucleotide"
  source 1..1470: mol_type = other DNA
atggccctccctgtcaccgccctgctgcttccgctggctcttctgctccacgccgctcggcccgaagtgcagcttgtcgaatccggggggggactggtcaagccgggcggatcactgagactgtcctgcgccgcgagcggcttcacgttctcctcctactccatgaactgggtccgccaagcccccgggaagggactggaatgggtgtcctctatctcctcgtcgtcgtcctacatctactacgccgactccgtgaagggaagattcaccatttcccgcgacaacgcaaagaactcactgtacttgcaaatgaactcactccgggccgaagatactgctgtgtactattgcgccaagactattgccgccgtctacgctttcgacatctggggccagggaaccaccgtgactgtgtcgtccggtggtggtggctcgggcggaggaggaagcggcggcggggggtccgagattgtgctgacccagtcgccactgagcctccctgtgacccccgaggaacccgccagcatcagctgccggtccagccagtccctgctccactccaacggatacaattacctcgattggtaccttcagaagcctggacaaagcccgcagctgctcatctacttgggatcaaaccgcgcgtcaggagtgcctgaccggttctccggctcgggcagcggtaccgatttcaccctgaaaatctccagggtggaggcagaggacgtgggagtgtattactgtatgcaggcgctgcagactccgtacacatttgggcagggcaccaagctggagatcaagaccactaccccagcaccgaggccacccaccccggctcctaccatcgcctcccagcctctgtccctgcgtccggaggcatgtagacccgcagctggtggggccgtgcatacccggggtcttgacttcgcctgcgatatctacatttgggcccctctggctggtacttgcggggtcctgctgctttcactcgtgatcactctttactgtaagcgcggtcggaagaagctgctgtacatctttaagcaacccttcatgaggcctgtgcagactactcaagaggaggacggctgttcatgccggttcccagaggaggaggaaggcggctgcgaactgcgcgtgaaattcagccgcagcgcagatgctccagcctacaagcaggggcagaaccagctctacaacgaactcaatcttggtcggagagaggagtacgacgtgctggacaagcggagaggacgggacccagaaatgggcgggaagccgcgcagaaagaatccccaagagggcctgtacaacgagctccaaaaggataagatggcagaagcctatagcgagattggtatgaaaggggaacgcagaagaggcaaaggccacgacggactgtaccagggactcagcaccgccaccaaggacacctatgacgctcttcacatgcaggccctgccgcctcgg

SEQ ID NO: 1075 - protein, 240 aa, synthetic construct
  REGION 1..240: note = source = /note="Description of Artificial Sequence: Synthetic polypeptide"
EVQLVESGGGLVKPGGSLRLSCAASGFTFSDYYMSWIRQAPGKGLEWVSYISSSGSTIYYADSVKGRFTISRDNAKNSLYLQMNSLRAEDTAVYYCARDLRGAFDIWGQGTMVTVSSGGGGSGGGGSGGGGSSYVLTQSPSVSAAPGYTATISCGGNNIGTKSVHWYQQKPGQAPLLVIRDDSVRPSKIPGRFSGSNSGNMATLTISGVQAGDEADFYCQVWDSDSEHVVFGGGTKLTVL

SEQ ID NO: 1076 - DNA, 720 bp, synthetic construct
  misc_feature 1..720: note = source = /note="Description of Artificial Sequence: Synthetic polynucleotide"
  source 1..720: mol_type = other DNA
gaagtccagctcgtggagtccggcggaggccttgtgaagcctggaggttcgctgagactgtcctgcgccgcctccggcttcaccttctccgactactacatgtcctggatcagacaggccccgggaaagggcctggaatgggtgtcctacatctcgtcatcgggcagcactatctactacgcggactcagtgaaggggcggttcaccatttcccgggataacgcgaagaactcgctgtatctgcaaatgaactcactgagggccgaggacaccgccgtgtactactgcgcccgcgatctccgcggggcatttgacatctggggacagggaaccatggtcacagtgtccagcggagggggaggatcgggtggcggaggttccgggggtggaggctcctcctacgtgctgactcagagcccaagcgtcagcgctgcgcccggttacacggcaaccatctcctgtggcggaaacaacattgggaccaagtctgtgcactggtatcagcagaagccgggccaagctcccctgttggtgatccgcgatgactccgtgcggcctagcaaaattccgggacggttctccggctccaacagcggcaatatggccactctcaccatctcgggagtgcaggccggagatgaagccgacttctactgccaagtctgggactcagactccgagcatgtggtgttcgggggcggaaccaagctgactgtgctc

SEQ ID NO: 1077 - protein, 117 aa, synthetic construct
  REGION 1..117: note = source = /note="Description of Artificial Sequence: Synthetic polypeptide"
EVQLVESGGGLVKPGGSLRLSCAASGFTFSDYYMSWIRQAPGKGLEWVSYISSSGSTIYYADSVKGRFTISRDNAKNSLYLQMNSLRAEDTAVYYCARDLRGAFDIWGQGTMVTVSS

SEQ ID NO: 1078 - protein, 108 aa, synthetic construct
  REGION 1..108: note = source = /note="Description of Artificial Sequence: Synthetic polypeptide"
SYVLTQSPSVSAAPGYTATISCGGNNIGTKSVHWYQQKPGQAPLLVIRDDSVRPSKIPGRFSGSNSGNMATLTISGVQAGDEADFYCQVWDSDSEHVVFGGGTKLTVL

SEQ ID NO: 1079 - protein, 484 aa, synthetic construct
  REGION 1..484: note = source = /note="Description of Artificial Sequence: Synthetic polypeptide"
MALPVTALLLPLALLLHAARPEVQLVESGGGLVKPGGSLRLSCAASGFTFSDYYMSWIRQAPGKGLEWVSYISSSGSTIYYADSVKGRFTISRDNAKNSLYLQMNSLRAEDTAVYYCARDLRGAFDIWGQGTMVTVSSGGGGSGGGGSGGGGSSYVLTQSPSVSAAPGYTATISCGGNNIGTKSVHWYQQKPGQAPLLVIRDDSVRPSKIPGRFSGSNSGNMATLTISGVQAGDEADFYCQVWDSDSEHVVFGGGTKLTVLTTTPAPRPPTPAPTIASQPLSLRPEACRPAAGGAVHTRGLDFACDIYIWAPLAGTCGVLLLSLVITLYCKRGRKKLLYIFKQPFMRPVQTTQEEDGCSCRFPEEEEGGCELRVKFSRSADAPAYKQGQNQLYNELNLGRREEYDVLDKRRGRDPEMGGKPRRKNPQEGLYNELQKDKMAEAYSEIGMKGERRRGKGHDGLYQGLSTATKDTYDALHMQALPPR

SEQ ID NO: 1080 - DNA, 1452 bp, synthetic construct
  misc_feature 1..1452: note = source = /note="Description of Artificial Sequence: Synthetic polynucleotide"
  source 1..1452: mol_type = other DNA
atggccctccctgtcaccgccctgctgcttccgctggctcttctgctccacgccgctcggcccgaagtccagctcgtggagtccggcggaggccttgtgaagcctggaggttcgctgagactgtcctgcgccgcctccggcttcaccttctccgactactacatgtcctggatcagacaggccccgggaaagggcctggaatgggtgtcctacatctcgtcatcgggcagcactatctactacgcggactcagtgaaggggcggttcaccatttcccgggataacgcgaagaactcgctgtatctgcaaatgaactcactgagggccgaggacaccgccgtgtactactgcgcccgcgatctccgcggggcatttgacatctggggacagggaaccatggtcacagtgtccagcggagggggaggatcgggtggcggaggttccgggggtggaggctcctcctacgtgctgactcagagcccaagcgtcagcgctgcgcccggttacacggcaaccatctcctgtggcggaaacaacattgggaccaagtctgtgcactggtatcagcagaagccgggccaagctcccctgttggtgatccgcgatgactccgtgcggcctagcaaaattccgggacggttctccggctccaacagcggcaatatggccactctcaccatctcgggagtgcaggccggagatgaagccgacttctactgccaagtctgggactcagactccgagcatgtggtgttcgggggcggaaccaagctgactgtgctcaccactaccccagcaccgaggccacccaccccggctcctaccatcgcctcccagcctctgtccctgcgtccggaggcatgtagacccgcagctggtggggccgtgcatacccggggtcttgacttcgcctgcgatatctacatttgggcccctctggctggtacttgcggggtcctgctgctttcactcgtgatcactctttactgtaagcgcggtcggaagaagctgctgtacatctttaagcaacccttcatgaggcctgtgcagactactcaagaggaggacggctgttcatgccggttcccagaggaggaggaaggcggctgcgaactgcgcgtgaaattcagccgcagcgcagatgctccagcctacaagcaggggcagaaccagctctacaacgaactcaatcttggtcggagagaggagtacgacgtgctggacaagcggagaggacgggacccagaaatgggcgggaagccgcgcagaaagaatccccaagagggcctgtacaacgagctccaaaaggataagatggcagaagcctatagcgagattggtatgaaaggggaacgcagaagaggcaaaggccacgacggactgtaccagggactcagcaccgccaccaaggacacctatgacgctcttcacatgcaggccctgccgcctcgg

SEQ ID NO: 1081 - protein, 241 aa, synthetic construct
  REGION 1..241: note = source = /note="Description of Artificial Sequence: Synthetic polypeptide"
QVQLVQSGAEVKKPGASVKVSCKPSGYTVTSHYIHWVRRAPGQGLEWMGMINPSGGVTAYSQTLQGRVTMTSDTSSSTVYMELSSLRSEDTAMYYCAREGSGSGWYFDFWGRGTLVTVSSGGGGSGGGGSGGGGSSYVLTQPPSVSVSPGQTASITCSGDGLSKKYVSWYQQKAGQSPVVLISRDKERPSGIPDRFSGSNSADTATLTISGTQAMDEADYYCQAWDDTTVVFGGGTKLTVL

SEQ ID NO: 1082 - DNA, 723 bp, synthetic construct
  misc_feature 1..723: note = source = /note="Description of Artificial Sequence: Synthetic polynucleotide"
  source 1..723: mol_type = other DNA
caagtgcagctggtgcagagcggggccgaagtcaagaagccgggagcctccgtgaaagtgtcctgcaagccttcgggatacaccgtgacctcccactacattcattgggtccgccgcgcccccggccaaggactcgagtggatgggcatgatcaaccctagcggcggagtgaccgcgtacagccagacgctgcagggacgcgtgactatgacctcggatacctcctcctccaccgtctatatggaactgtccagcctgcggtccgaggataccgccatgtactactgcgcccgggaaggatcaggctccgggtggtatttcgacttctggggaagaggcaccctcgtgactgtgtcatctgggggagggggttccggtggtggcggatcgggaggaggcggttcatcctacgtgctgacccagccaccctccgtgtccgtgagccccggccagactgcatcgattacatgtagcggcgacggcctctccaagaaatacgtgtcgtggtaccagcagaaggccggacagagcccggtggtgctgatctcaagagataaggagcggcctagcggaatcccggacaggttctcgggttccaactccgcggacactgctactctgaccatctcggggacccaggctatggacgaagccgattactactgccaagcctgggacgacactactgtcgtgtttggagggggcaccaagttgaccgtcctt

SEQ ID NO: 1083 - protein, 120 aa, synthetic construct
  REGION 1..120: note = source = /note="Description of Artificial Sequence: Synthetic polypeptide"
QVQLVQSGAEVKKPGASVKVSCKPSGYTVTSHYIHWVRRAPGQGLEWMGMINPSGGVTAYSQTLQGRVTMTSDTSSSTVYMELSSLRSEDTAMYYCAREGSGSGWYFDFWGRGTLVTVSS

SEQ ID NO: 1084 - protein, 106 aa, synthetic construct
  REGION 1..106: note = source = /note="Description of Artificial Sequence: Synthetic polypeptide"
SYVLTQPPSVSVSPGQTASITCSGDGLSKKYVSWYQQKAGQSPVVLISRDKERPSGIPDRFSGSNSADTATLTISGTQAMDEADYYCQAWDDTTVVFGGGTKLTVL

SEQ ID NO: 1085 - protein, 485 aa, synthetic construct
  REGION 1..485: note = source = /note="Description of Artificial Sequence: Synthetic polypeptide"
MALPVTALLLPLALLLHAARPQVQLVQSGAEVKKPGASVKVSCKPSGYTVTSHYIHWVRRAPGQGLEWMGMINPSGGVTAYSQTLQGRVTMTSDTSSSTVYMELSSLRSEDTAMYYCAREGSGSGWYFDFWGRGTLVTVSSGGGGSGGGGSGGGGSSYVLTQPPSVSVSPGQTASITCSGDGLSKKYVSWYQQKAGQSPVVLISRDKERPSGIPDRFSGSNSADTATLTISGTQAMDEADYYCQAWDDTTVVFGGGTKLTVLTTTPAPRPPTPAPTIASQPLSLRPEACRPAAGGAVHTRGLDFACDIYIWAPLAGTCGVLLLSLVITLYCKRGRKKLLYIFKQPFMRPVQTTQEEDGCSCRFPEEEEGGCELRVKFSRSADAPAYKQGQNQLYNELNLGRREEYDVLDKRRGRDPEMGGKPRRKNPQEGLYNELQKDKMAEAYSEIGMKGERRRGKGHDGLYQGLSTATKDTYDALHMQALPPR

SEQ ID NO: 1086 - DNA, 1455 bp, synthetic construct
  misc_feature 1..1455: note = source = /note="Description of Artificial Sequence: Synthetic polynucleotide"
  source 1..1455: mol_type = other DNA
atggccctccctgtcaccgccctgctgcttccgctggctcttctgctccacgccgctcggccccaagtgcagctggtgcagagcggggccgaagtcaagaagccgggagcctccgtgaaagtgtcctgcaagccttcgggatacaccgtgacctcccactacattcattgggtccgccgcgcccccggccaaggactcgagtggatgggcatgatcaaccctagcggcggagtgaccgcgtacagccagacgctgcagggacgcgtgactatgacctcggatacctcctcctccaccgtctatatggaactgtccagcctgcggtccgaggataccgccatgtactactgcgcccgggaaggatcaggctccgggtggtatttcgacttctggggaagaggcaccctcgtgactgtgtcatctgggggagggggttccggtggtggcggatcgggaggaggcggttcatcctacgtgctgacccagccaccctccgtgtccgtgagccccggccagactgcatcgattacatgtagcggcgacggcctctccaagaaatacgtgtcgtggtaccagcagaaggccggacagagcccggtggtgctgatctcaagagataaggagcggcctagcggaatcccggacaggttctcgggttccaactccgcggacactgctactctgaccatctcggggacccaggctatggacgaagccgattactactgccaagcctgggacgacactactgtcgtgtttggagggggcaccaagttgaccgtccttaccactaccccagcaccgaggccacccaccccggctcctaccatcgcctcccagcctctgtccctgcgtccggaggcatgtagacccgcagctggtggggccgtgcatacccggggtcttgacttcgcctgcgatatctacatttgggcccctctggctggtacttgcggggtcctgctgctttcactcgtgatcactctttactgtaagcgcggtcggaagaagctgctgtacatctttaagcaacccttcatgaggcctgtgcagactactcaagaggaggacggctgttcatgccggttcccagaggaggaggaaggcggctgcgaactgcgcgtgaaattcagccgcagcgcagatgctccagcctacaagcaggggcagaaccagctctacaacgaactcaatcttggtcggagagaggagtacgacgtgctggacaagcggagaggacgggacccagaaatgggcgggaagccgcgcagaaagaatccccaagagggcctgtacaacgagctccaaaaggataagatggcagaagcctatagcgagattggtatgaaaggggaacgcagaagaggcaaaggccacgacggactgtaccagggactcagcaccgccaccaaggacacctatgacgctcttcacatgcaggccctgccgcctcgg

SEQ ID NO: 1087 - protein, 245 aa, synthetic construct
  REGION 1..245: note = source = /note="Description of Artificial Sequence: Synthetic polypeptide"
QVQLQESGPGLVKPSQTLSLTCTVSGGSISSGGYYWSWIRQHPGKGLEWIGYIYYSGSTYYNPSLKSRVTISVDTSKNQFSLKLSSVTAADTAVYYCARAGIAARLRGAFDIWGQGTMVTVSSGGGGSGGGGSGGGGSDIVMTQSPSSVSASVGDRVIITCRASQGIRNWLAWYQQKPGKAPNLLIYAASNLQSGVPSRFSGSGSGADFTLTISSLQPEDVATYYCQKYNSAPFTFGPGTKVDIK

SEQ ID NO: 1088 - DNA, 735 bp, synthetic construct
  misc_feature 1..735: note = source = /note="Description of Artificial Sequence: Synthetic polynucleotide"
  source 1..735: mol_type = other DNA
caagtgcagcttcaggagagcggcccgggactcgtgaagccgtcccagaccctgtccctgacttgcaccgtgtcgggaggaagcatctcgagcggaggctactattggtcgtggattcggcagcaccctggaaagggcctggaatggatcggctacatctactactccggctcgacctactacaacccatcgctgaagtccagagtgacaatctcagtggacacgtccaagaatcagttcagcctgaagctctcttccgtgactgcggccgacaccgccgtgtactactgcgcacgcgctggaattgccgcccggctgaggggtgccttcgacatttggggacagggcaccatggtcaccgtgtcctccggcggcggaggttccgggggtggaggctcaggaggaggggggtccgacatcgtcatgactcagtcgccctcaagcgtcagcgcgtccgtcggggacagagtgatcatcacctgtcgggcgtcccagggaattcgcaactggctggcctggtatcagcagaagcccggaaaggcccccaacctgttgatctacgccgcctcaaacctccaatccggggtgccgagccgcttcagcggctccggttcgggtgccgatttcactctgaccatctcctccctgcaacctgaagatgtggctacctactactgccaaaagtacaactccgcaccttttactttcggaccggggaccaaagtggacattaag

SEQ ID NO: 1089 - protein, 123 aa, synthetic construct
  REGION 1..123: note = source = /note="Description of Artificial Sequence: Synthetic polypeptide"
QVQLQESGPGLVKPSQTLSLTCTVSGGSISSGGYYWSWIRQHPGKGLEWIGYIYYSGSTYYNPSLKSRVTISVDTSKNQFSLKLSSVTAADTAVYYCARAGIAARLRGAFDIWGQGTMVTVSS

SEQ ID NO: 1090 - protein, 107 aa, synthetic construct
  REGION 1..107: note = source = /note="Description of Artificial Sequence: Synthetic polypeptide"
DIVMTQSPSSVSASVGDRVIITCRASQGIRNWLAWYQQKPGKAPNLLIYAASNLQSGVPSRFSGSGSGADFTLTISSLQPEDVATYYCQKYNSAPFTFGPGTKVDIK

SEQ ID NO: 1091 - protein, 489 aa, synthetic construct
  REGION 1..489: note = source = /note="Description of Artificial Sequence: Synthetic polypeptide"
MALPVTALLLPLALLLHAARPQVQLQESGPGLVKPSQTLSLTCTVSGGSISSGGYYWSWIRQHPGKGLEWIGYIYYSGSTYYNPSLKSRVTISVDTSKNQFSLKLSSVTAADTAVYYCARAGIAARLRGAFDIWGQGTMVTVSSGGGGSGGGGSGGGGSDIVMTQSPSSVSASVGDRVIITCRASQGIRNWLAWYQQKPGKAPNLLIYAASNLQSGVPSRFSGSGSGADFTLTISSLQPEDVATYYCQKYNSAPFTFGPGTKVDIKTTTPAPRPPTPAPTIASQPLSLRPEACRPAAGGAVHTRGLDFACDIYIWAPLAGTCGVLLLSLVITLYCKRGRKKLLYIFKQPFMRPVQTTQEEDGCSCRFPEEEEGGCELRVKFSRSADAPAYKQGQNQLYNELNLGRREEYDVLDKRRGRDPEMGGKPRRKNPQEGLYNELQKDKMAEAYSEIGMKGERRRGKGHDGLYQGLSTATKDTYDALHMQALPPR

SEQ ID NO: 1092 - DNA, 1467 bp, synthetic construct
  misc_feature 1..1467: note = source = /note="Description of Artificial Sequence: Synthetic polynucleotide"
  source 1..1467: mol_type = other DNA
atggccctccctgtcaccgccctgctgcttccgctggctcttctgctccacgccgctcggccccaagtgcagcttcaggagagcggcccgggactcgtgaagccgtcccagaccctgtccctgacttgcaccgtgtcgggaggaagcatctcgagcggaggctactattggtcgtggattcggcagcaccctggaaagggcctggaatggatcggctacatctactactccggctcgacctactacaacccatcgctgaagtccagagtgacaatctcagtggacacgtccaagaatcagttcagcctgaagctctcttccgtgactgcggccgacaccgccgtgtactactgcgcacgcgctggaattgccgcccggctgaggggtgccttcgacatttggggacagggcaccatggtcaccgtgtcctccggcggcggaggttccgggggtggaggctcaggaggaggggggtccgacatcgtcatgactcagtcgccctcaagcgtcagcgcgtccgtcggggacagagtgatcatcacctgtcgggcgtcccagggaattcgcaactggctggcctggtatcagcagaagcccggaaaggcccccaacctgttgatctacgccgcctcaaacctccaatccggggtgccgagccgcttcagcggctccggttcgggtgccgatttcactctgaccatctcctccctgcaacctgaagatgtggctacctactactgccaaaagtacaactccgcaccttttactttcggaccggggaccaaagtggacattaagaccactaccccagcaccgaggccacccaccccggctcctaccatcgcctcccagcctctgtccctgcgtccggaggcatgtagacccgcagctggtggggccgtgcatacccggggtcttgacttcgcctgcgatatctacatttgggcccctctggctggtacttgcggggtcctgctgctttcactcgtgatcactctttactgtaagcgcggtcggaagaagctgctgtacatctttaagcaacccttcatgaggcctgtgcagactactcaagaggaggacggctgttcatgccggttcccagaggaggaggaaggcggctgcgaactgcgcgtgaaattcagccgcagcgcagatgctccagcctacaagcaggggcagaaccagctctacaacgaactcaatcttggtcggagagaggagtacgacgtgctggacaagcggagaggacgggacccagaaatgggcgggaagccgcgcagaaagaatccccaagagggcctgtacaacgagctccaaaaggataagatggcagaagcctatagcgagattggtatgaaaggggaacgcagaagaggcaaaggccacgacggactgtaccagggactcagcaccgccaccaaggacacctatgacgctcttcacatgcaggccctgccgcctcgg

SEQ ID NO: 1093 - protein, 253 aa, synthetic construct
  REGION 1..253: note = source = /note="Description of Artificial Sequence: Synthetic polypeptide"
QVQLVQSGAEVKKPGSSVKVSCKASGGTFSSYAISWVRQAPGQGLEWMGGIIPIFGTANYAQKFQGRVTITADESTSTAYMELSSLRSEDTAVYYCARRGGYQLLRWDVGLLRSAFDIWGQGTMVTVSSGGGGSGGGGSGGGGSSYVLTQPPSVSVAPGQTARITCGGNNIGSKSVHWYQQKPGQAPVLVLYGKNNRPSGVPDRFSGSRSGTTASLTITGAQAEDEADYYCSSRDSSGDHLRVFGTGTKVTVL

SEQ ID NO: 1094 - DNA, 759 bp, synthetic construct
  misc_feature 1..759: note = source = /note="Description of Artificial Sequence: Synthetic polynucleotide"
  source 1..759: mol_type = other DNA
caagtgcagctggtccagtcgggcgccgaggtcaagaagcccgggagctctgtgaaagtgtcctgcaaggcctccgggggcacctttagctcctacgccatctcctgggtccgccaagcaccgggtcaaggcctggagtggatggggggaattatccctatcttcggcactgccaactacgcccagaagttccagggacgcgtgaccattaccgcggacgaatccacctccaccgcttatatggagctgtccagcttgcgctcggaagataccgccgtgtactactgcgcccggaggggtggataccagctgctgagatgggacgtgggcctcctgcggtcggcgttcgacatctggggccagggcactatggtcactgtgtccagcggaggaggcggatcgggaggcggcggatcagggggaggcggttccagctacgtgcttactcaacccccttcggtgtccgtggccccgggacagaccgccagaatcacttgcggaggaaacaacattgggtccaagagcgtgcattggtaccagcagaagccaggacaggcccctgtgctggtgctctacgggaagaacaatcggcccagcggagtgccggacaggttctcgggttcacgctccggtacaaccgcttcactgactatcaccggggcccaggcagaggatgaagcggactactactgttcctcccgggattcatccggcgaccacctccgggtgttcggaaccggaacgaaggtcaccgtgctg

SEQ ID NO: 1095 - protein, 129 aa, synthetic construct
  REGION 1..129: note = source = /note="Description of Artificial Sequence: Synthetic polypeptide"
QVQLVQSGAEVKKPGSSVKVSCKASGGTFSSYAISWVRQAPGQGLEWMGGIIPIFGTANYAQKFQGRVTITADESTSTAYMELSSLRSEDTAVYYCARRGGYQLLRWDVGLLRSAFDIWGQGTMVTVSS

SEQ ID NO: 1096 - protein, 109 aa, synthetic construct
  REGION 1..109: note = source = /note="Description of Artificial Sequence: Synthetic polypeptide"
SYVLTQPPSVSVAPGQTARITCGGNNIGSKSVHWYQQKPGQAPVLVLYGKNNRPSGVPDRFSGSRSGTTASLTITGAQAEDEADYYCSSRDSSGDHLRVFGTGTKVTVL

SEQ ID NO: 1097 - protein, 497 aa, synthetic construct
  REGION 1..497: note = source = /note="Description of Artificial Sequence: Synthetic polypeptide"
MALPVTALLLPLALLLHAARPQVQLVQSGAEVKKPGSSVKVSCKASGGTFSSYAISWVRQAPGQGLEWMGGIIPIFGTANYAQKFQGRVTITADESTSTAYMELSSLRSEDTAVYYCARRGGYQLLRWDVGLLRSAFDIWGQGTMVTVSSGGGGSGGGGSGGGGSSYVLTQPPSVSVAPGQTARITCGGNNIGSKSVHWYQQKPGQAPVLVLYGKNNRPSGVPDRFSGSRSGTTASLTITGAQAEDEADYYCSSRDSSGDHLRVFGTGTKVTVLTTTPAPRPPTPAPTIASQPLSLRPEACRPAAGGAVHTRGLDFACDIYIWAPLAGTCGVLLLSLVITLYCKRGRKKLLYIFKQPFMRPVQTTQEEDGCSCRFPEEEEGGCELRVKFSRSADAPAYKQGQNQLYNELNLGRREEYDVLDKRRGRDPEMGGKPRRKNPQEGLYNELQKDKMAEAYSEIGMKGERRRGKGHDGLYQGLSTATKDTYDALHMQALPPR

SEQ ID NO: 1098 - DNA, 1491 bp, synthetic construct
  misc_feature 1..1491: note = source = /note="Description of Artificial Sequence: Synthetic polynucleotide"
  source 1..1491: mol_type = other DNA
atggccctccctgtcaccgccctgctgcttccgctggctcttctgctccacgccgctcggccccaagtgcagctggtccagtcgggcgccgaggtcaagaagcccgggagctctgtgaaagtgtcctgcaaggcctccgggggcacctttagctcctacgccatctcctgggtccgccaagcaccgggtcaaggcctggagtggatggggggaattatccctatcttcggcactgccaactacgcccagaagttccagggacgcgtgaccattaccgcggacgaatccacctccaccgcttatatggagctgtccagcttgcgctcggaagataccgccgtgtactactgcgcccggaggggtggataccagctgctgagatgggacgtgggcctcctgcggtcggcgttcgacatctggggccagggcactatggtcactgtgtccagcggaggaggcggatcgggaggcggcggatcagggggaggcggttccagctacgtgcttactcaacccccttcggtgtccgtggccccgggacagaccgccagaatcacttgcggaggaaacaacattgggtccaagagcgtgcattggtaccagcagaagccaggacaggcccctgtgctggtgctctacgggaagaacaatcggcccagcggagtgccggacaggttctcgggttcacgctccggtacaaccgcttcactgactatcaccggggcccaggcagaggatgaagcggactactactgttcctcccgggattcatccggcgaccacctccgggtgttcggaaccggaacgaaggtcaccgtgctgaccactaccccagcaccgaggccacccaccccggctcctaccatcgcctcccagcctctgtccctgcgtccggaggcatgtagacccgcagctggtggggccgtgcatacccggggtcttgacttcgcctgcgatatctacatttgggcccctctggctggtacttgcggggtcctgctgctttcactcgtgatcactctttactgtaagcgcggtcggaagaagctgctgtacatctttaagcaacccttcatgaggcctgtgcagactactcaagaggaggacggctgttcatgccggttcccagaggaggaggaaggcggctgcgaactgcgcgtgaaattcagccgcagcgcagatgctccagcctacaagcaggggcagaaccagctctacaacgaactcaatcttggtcggagagaggagtacgacgtgctggacaagcggagaggacgggacccagaaatgggcgggaagccgcgcagaaagaatccccaagagggcctgtacaacgagctccaaaaggataagatggcagaagcctatagcgagattggtatgaaaggggaacgcagaagaggcaaaggccacgacggactgtaccagggactcagcaccgccaccaaggacacctatgacgctcttcacatgcaggccctgccgcctcgg

SEQ ID NO: 1099 - protein, 248 aa, synthetic construct
  REGION 1..248: note = source = /note="Description of Artificial Sequence: Synthetic polypeptide"
EVQLQQSGPGLVKPSQTLSLTCAISGDSVSSNSAAWNWIRQSPSRGLEWLGRTYYRSKWYSFYAISLKSRIIINPDTSKNQFSLQLKSVTPEDTAVYYCARSSPEGLFLYWFDPWGQGTLVTVSSGGDGSGGGGSGGGGSSSELTQDPAVSVALGQTIRITCQGDSLGNYYATWYQQKPGQAPVLVIYGTNNRPSGIPDRFSASSSGNTASLTITGAQAEDEADYYCNSRDSSGHHLLFGTGTKVTVL

SEQ ID NO: 1100 - DNA, 744 bp, synthetic construct
  misc_feature 1..744: note = source = /note="Description of Artificial Sequence: Synthetic polynucleotide"
  source 1..744: mol_type = other DNA
gaagtgcagctccaacagtcaggaccggggctcgtgaagccatcccagaccctgtccctgacttgtgccatctcgggagatagcgtgtcatcgaactccgccgcctggaactggattcggcagagcccgtcccgcggactggagtggcttggaaggacctactaccggtccaagtggtactctttctacgcgatctcgctgaagtcccgcattatcattaaccctgatacctccaagaatcagttctccctccaactgaaatccgtcacccccgaggacacagcagtgtattactgcgcacggagcagccccgaaggactgttcctgtattggtttgacccctggggccaggggactcttgtgaccgtgtcgagcggcggagatgggtccggtggcggtggttcggggggcggcggatcatcatccgaactgacccaggacccggctgtgtccgtggcgctgggacaaaccatccgcattacgtgccagggagactccctgggcaactactacgccacttggtaccagcagaagccgggccaagcccctgtgttggtcatctacgggaccaacaacagaccttccggcatccccgaccggttcagcgcttcgtcctccggcaacactgccagcctgaccatcactggagcgcaggccgaagatgaggccgactactactgcaacagcagagactcctcgggtcatcacctcttgttcggaactggaaccaaggtcaccgtgctg

SEQ ID NO: 1101 - protein, 125 aa, synthetic construct
  REGION 1..125: note = source = /note="Description of Artificial Sequence: Synthetic polypeptide"
EVQLQQSGPGLVKPSQTLSLTCAISGDSVSSNSAAWNWIRQSPSRGLEWLGRTYYRSKWYSFYAISLKSRIIINPDTSKNQFSLQLKSVTPEDTAVYYCARSSPEGLFLYWFDPWGQGTLVTVSS

SEQ ID NO: 1102 - protein, 108 aa, synthetic construct
  REGION 1..108: note = source = /note="Description of Artificial Sequence: Synthetic polypeptide"
SSELTQDPAVSVALGQTIRITCQGDSLGNYYATWYQQKPGQAPVLVIYGTNNRPSGIPDRFSASSSGNTASLTITGAQAEDEADYYCNSRDSSGHHLLFGTGTKVTVL

SEQ ID NO: 1103 - protein, 492 aa, synthetic construct
  REGION 1..492: note = source = /note="Description of Artificial Sequence: Synthetic polypeptide"
MALPVTALLLPLALLLHAARPEVQLQQSGPGLVKPSQTLSLTCAISGDSVSSNSAAWNWIRQSPSRGLEWLGRTYYRSKWYSFYAISLKSRIIINPDTSKNQFSLQLKSVTPEDTAVYYCARSSPEGLFLYWFDPWGQGTLVTVSSGGDGSGGGGSGGGGSSSELTQDPAVSVALGQTIRITCQGDSLGNYYATWYQQKPGQAPVLVIYGTNNRPSGIPDRFSASSSGNTASLTITGAQAEDEADYYCNSRDSSGHHLLFGTGTKVTVLTTTPAPRPPTPAPTIASQPLSLRPEACRPAAGGAVHTRGLDFACDIYIWAPLAGTCGVLLLSLVITLYCKRGRKKLLYIFKQPFMRPVQTTQEEDGCSCRFPEEEEGGCELRVKFSRSADAPAYKQGQNQLYNELNLGRREEYDVLDKRRGRDPEMGGKPRRKNPQEGLYNELQKDKMAEAYSEIGMKGERRRGKGHDGLYQGLSTATKDTYDALHMQALPPR

SEQ ID NO: 1104 - DNA, 1476 bp, synthetic construct
  misc_feature 1..1476: note = source = /note="Description of Artificial Sequence: Synthetic polynucleotide"
  source 1..1476: mol_type = other DNA
atggccctccctgtcaccgccctgctgcttccgctggctcttctgctccacgccgctcggcccgaagtgcagctccaacagtcaggaccggggctcgtgaagccatcccagaccctgtccctgacttgtgccatctcgggagatagcgtgtcatcgaactccgccgcctggaactggattcggcagagcccgtcccgcggactggagtggcttggaaggacctactaccggtccaagtggtactctttctacgcgatctcgctgaagtcccgcattatcattaaccctgatacctccaagaatcagttctccctccaactgaaatccgtcacccccgaggacacagcagtgtattactgcgcacggagcagccccgaaggactgttcctgtattggtttgacccctggggccaggggactcttgtgaccgtgtcgagcggcggagatgggtccggtggcggtggttcggggggcggcggatcatcatccgaactgacccaggacccggctgtgtccgtggcgctgggacaaaccatccgcattacgtgccagggagactccctgggcaactactacgccacttggtaccagcagaagccgggccaagcccctgtgttggtcatctacgggaccaacaacagaccttccggcatccccgaccggttcagcgcttcgtcctccggcaacactgccagcctgaccatcactggagcgcaggccgaagatgaggccgactactactgcaacagcagagactcctcgggtcatcacctcttgttcggaactggaaccaaggtcaccgtgctgaccactaccccagcaccgaggccacccaccccggctcctaccatcgcctcccagcctctgtccctgcgtccggaggcatgtagacccgcagctggtggggccgtgcatacccggggtcttgacttcgcctgcgatatctacatttgggcccctctggctggtacttgcggggtcctgctgctttcactcgtgatcactctttactgtaagcgcggtcggaagaagctgctgtacatctttaagcaacccttcatgaggcctgtgcagactactcaagaggaggacggctgttcatgccggttcccagaggaggaggaaggcggctgcgaactgcgcgtgaaattcagccgcagcgcagatgctccagcctacaagcaggggcagaaccagctctacaacgaactcaatcttggtcggagagaggagtacgacgtgctggacaagcggagaggacgggacccagaaatgggcgggaagccgcgcagaaagaatccccaagagggcctgtacaacgagctccaaaaggataagatggcagaagcctatagcgagattggtatgaaaggggaacgcagaagaggcaaaggccacgacggactgtaccagggactcagcaccgccaccaaggacacctatgacgctcttcacatgcaggccctgccgcctcgg

SEQ ID NO: 1105 - protein, 246 aa, synthetic construct
  REGION 1..246: note = source = /note="Description of Artificial Sequence: Synthetic polypeptide"
EVQLVESGGGLVQPGGSLRLSCAASGFTFSSYAMSWVRQAPGKGLEWVSAISGSGGSTYYADSVKGRFTISRDNSKNTLYLQMNSLRAEDTAVYYCAKVEGSGSLDYWGQGTLVTVSSGGGGSGGGGSGGGGSEIVMTQSPGTLSLSPGERATLSCRASQSVSSAYLAWYQQKPGQPPRLLISGASTRATGIPDRFGGSGSGTDFTLTISRLEPEDFAVYYCQHYGSSFNGSSLFTFGQGTRLEIK

SEQ ID NO: 1106 - DNA, 738 bp, synthetic construct
  misc_feature 1..738: note = source = /note="Description of Artificial Sequence: Synthetic polynucleotide"
  source 1..738: mol_type = other DNA
gaagtgcagctcgtggagtcaggaggcggcctggtccagccgggagggtcccttagactgtcatgcgccgcaagcggattcactttctcctcctatgccatgagctgggtccgccaagcccccggaaagggactggaatgggtgtccgccatctcggggtctggaggctcaacttactacgctgactccgtgaagggacggttcaccattagccgcgacaactccaagaacaccctctacctccaaatgaactccctgcgggccgaggataccgccgtctactactgcgccaaagtggaaggttcaggatcgctggactactggggacagggtactctcgtgaccgtgtcatcgggcggaggaggttccggcggtggcggctccggcggcggagggtcggagatcgtgatgacccagagccctggtactctgagcctttcgccgggagaaagggccaccctgtcctgccgcgcttcccaatccgtgtcctccgcgtacttggcgtggtaccagcagaagccgggacagccccctcggctgctgatcagcggggccagcacccgggcaaccggaatcccagacagattcgggggttccggcagcggcacagatttcaccctgactatttcgaggttggagcccgaggactttgcggtgtattactgtcagcactacgggtcgtcctttaatggctccagcctgttcacgttcggacaggggacccgcctggaaatcaag

SEQ ID NO: 1107 - protein, 118 aa, synthetic construct
  REGION 1..118: note = source = /note="Description of Artificial Sequence: Synthetic polypeptide"
EVQLVESGGGLVQPGGSLRLSCAASGFTFSSYAMSWVRQAPGKGLEWVSAISGSGGSTYYADSVKGRFTISRDNSKNTLYLQMNSLRAEDTAVYYCAKVEGSGSLDYWGQGTLVTVSS

SEQ ID NO: 1108 - protein, 113 aa, synthetic construct
  REGION 1..113: note = source = /note="Description of Artificial Sequence: Synthetic polypeptide"
EIVMTQSPGTLSLSPGERATLSCRASQSVSSAYLAWYQQKPGQPPRLLISGASTRATGIPDRFGGSGSGTDFTLTISRLEPEDFAVYYCQHYGSSFNGSSLFTFGQGTRLEIK

SEQ ID NO: 1109 - protein, 490 aa, synthetic construct
  REGION 1..490: note = source = /note="Description of Artificial Sequence: Synthetic polypeptide"
MALPVTALLLPLALLLHAARPEVQLVESGGGLVQPGGSLRLSCAASGFTFSSYAMSWVRQAPGKGLEWVSAISGSGGSTYYADSVKGRFTISRDNSKNTLYLQMNSLRAEDTAVYYCAKVEGSGSLDYWGQGTLVTVSSGGGGSGGGGSGGGGSEIVMTQSPGTLSLSPGERATLSCRASQSVSSAYLAWYQQKPGQPPRLLISGASTRATGIPDRFGGSGSGTDFTLTISRLEPEDFAVYYCQHYGSSFNGSSLFTFGQGTRLEIKTTTPAPRPPTPAPTIASQPLSLRPEACRPAAGGAVHTRGLDFACDIYIWAPLAGTCGVLLLSLVITLYCKRGRKKLLYIFKQPFMRPVQTTQEEDGCSCRFPEEEEGGCELRVKFSRSADAPAYKQGQNQLYNELNLGRREEYDVLDKRRGRDPEMGGKPRRKNPQEGLYNELQKDKMAEAYSEIGMKGERRRGKGHDGLYQGLSTATKDTYDALHMQALPPR

SEQ ID NO: 1110 - DNA, 1470 bp, synthetic construct
  misc_feature 1..1470: note = source = /note="Description of Artificial Sequence: Synthetic polynucleotide"
  source 1..1470: mol_type = other DNA
atggccctccctgtcaccgccctgctgcttccgctggctcttctgctccacgccgctcggcccgaagtgcagctcgtggagtcaggaggcggcctggtccagccgggagggtcccttagactgtcatgcgccgcaagcggattcactttctcctcctatgccatgagctgggtccgccaagcccccggaaagggactggaatgggtgtccgccatctcggggtctggaggctcaacttactacgctgactccgtgaagggacggttcaccattagccgcgacaactccaagaacaccctctacctccaaatgaactccctgcgggccgaggataccgccgtctactactgcgccaaagtggaaggttcaggatcgctggactactggggacagggtactctcgtgaccgtgtcatcgggcggaggaggttccggcggtggcggctccggcggcggagggtcggagatcgtgatgacccagagccctggtactctgagcctttcgccgggagaaagggccaccctgtcctgccgcgcttcccaatccgtgtcctccgcgtacttggcgtggtaccagcagaagccgggacagccccctcggctgctgatcagcggggccagcacccgggcaaccggaatcccagacagattcgggggttccggcagcggcacagatttcaccctgactatttcgaggttggagcccgaggactttgcggtgtattactgtcagcactacgggtcgtcctttaatggctccagcctgttcacgttcggacaggggacccgcctggaaatcaagaccactaccccagcaccgaggccacccaccccggctcctaccatcgcctcccagcctctgtccctgcgtccggaggcatgtagacccgcagctggtggggccgtgcatacccggggtcttgacttcgcctgcgatatctacatttgggcccctctggctggtacttgcggggtcctgctgctttcactcgtgatcactctttactgtaagcgcggtcggaagaagctgctgtacatctttaagcaacccttcatgaggcctgtgcagactactcaagaggaggacggctgttcatgccggttcccagaggaggaggaaggcggctgcgaactgcgcgtgaaattcagccgcagcgcagatgctccagcctacaagcaggggcagaaccagctctacaacgaactcaatcttggtcggagagaggagtacgacgtgctggacaagcggagaggacgggacccagaaatgggcgggaagccgcgcagaaagaatccccaagagggcctgtacaacgagctccaaaaggataagatggcagaagcctatagcgagattggtatgaaaggggaacgcagaagaggcaaaggccacgacggactgtaccagggactcagcaccgccaccaaggacacctatgacgctcttcacatgcaggccctgccgcctcgg

SEQ ID NO: 1111 - protein, 241 aa, synthetic construct
  REGION 1..241: note = source = /note="Description of Artificial Sequence: Synthetic polypeptide"
EVQLVETGGGLVQPGGSLRLSCAASGITFSRYPMSWVRQAPGKGLEWVSGISDSGVSTYYADSAKGRFTISRDNSKNTLFLQMSSLRDEDTAVYYCVTRAGSEASDIWGQGTMVTVSSGGGGSGGGGSGGGGSEIVLTQSPATLSLSPGERATLSCRASQSVSNSLAWYQQKPGQAPRLLIYDASSRATGIPDRFSGSGSGTDFTLTISRLEPEDFAIYYCQQFGTSSGLTFGGGTKLEIK

SEQ ID NO: 1112 - DNA, 723 bp, synthetic construct
  misc_feature 1..723: note = source = /note="Description of Artificial Sequence: Synthetic polynucleotide"
  source 1..723: mol_type = other DNA
gaagtgcaactggtggaaaccggtggcggcctggtgcagcctggaggatcattgaggctgtcatgcgcggccagcggtattaccttctcccggtaccccatgtcctgggtcagacaggccccggggaaagggcttgaatgggtgtccgggatctcggactccggtgtcagcacttactacgccgactccgccaagggacgcttcaccatttcccgggacaactcgaagaacaccctgttcctccaaatgagctccctccgggacgaggatactgcagtgtactactgcgtgacccgcgccgggtccgaggcgtctgacatttggggacagggcactatggtcaccgtgtcgtccggcggagggggctcgggaggcggtggcagcggaggaggagggtccgagatcgtgctgacccaatccccggccaccctctcgctgagccctggagaaagggcaaccttgtcctgtcgcgcgagccagtccgtgagcaactccctggcctggtaccagcagaagcccggacaggctccgagacttctgatctacgacgcttcgagccgggccactggaatccccgaccgcttttcggggtccggctcaggaaccgatttcaccctgacaatctcacggctggagccagaggatttcgccatctattactgccagcagttcggtacttcctccggcctgactttcggaggcggcacgaagctcgaaatcaag

SEQ ID NO: 1113 - protein, 118 aa, synthetic construct
  REGION 1..118: note = source = /note="Description of Artificial Sequence: Synthetic polypeptide"
EVQLVETGGGLVQPGGSLRLSCAASGITFSRYPMSWVRQAPGKGLEWVSGISDSGVSTYYADSAKGRFTISRDNSKNTLFLQMSSLRDEDTAVYYCVTRAGSEASDIWGQGTMVTVSS

SEQ ID NO: 1114 - protein, 108 aa, synthetic construct
  REGION 1..108: note = source = /note="Description of Artificial Sequence: Synthetic polypeptide"
EIVLTQSPATLSLSPGERATLSCRASQSVSNSLAWYQQKPGQAPRLLIYDASSRATGIPDRFSGSGSGTDFTLTISRLEPEDFAIYYCQQFGTSSGLTFGGGTKLEIK

SEQ ID NO: 1115 - protein, 485 aa, synthetic construct
  REGION 1..485: note = source = /note="Description of Artificial Sequence: Synthetic polypeptide"
MALPVTALLLPLALLLHAARPEVQLVETGGGLVQPGGSLRLSCAASGITFSRYPMSWVRQAPGKGLEWVSGISDSGVSTYYADSAKGRFTISRDNSKNTLFLQMSSLRDEDTAVYYCVTRAGSEASDIWGQGTMVTVSSGGGGSGGGGSGGGGSEIVLTQSPATLSLSPGERATLSCRASQSVSNSLAWYQQKPGQAPRLLIYDASSRATGIPDRFSGSGSGTDFTLTISRLEPEDFAIYYCQQFGTSSGLTFGGGTKLEIKTTTPAPRPPTPAPTIASQPLSLRPEACRPAAGGAVHTRGLDFACDIYIWAPLAGTCGVLLLSLVITLYCKRGRKKLLYIFKQPFMRPVQTTQEEDGCSCRFPEEEEGGCELRVKFSRSADAPAYKQGQNQLYNELNLGRREEYDVLDKRRGRDPEMGGKPRRKNPQEGLYNELQKDKMAEAYSEIGMKGERRRGKGHDGLYQGLSTATKDTYDALHMQALPPR

SEQ ID NO: 1116 - DNA, 1455 bp, synthetic construct
  misc_feature 1..1455: note = source = /note="Description of Artificial Sequence: Synthetic polynucleotide"
  source 1..1455: mol_type = other DNA
atggccctccctgtcaccgccctgctgcttccgctggctcttctgctccacgccgctcggcccgaagtgcaactggtggaaaccggtggcggcctggtgcagcctggaggatcattgaggctgtcatgcgcggccagcggtattaccttctcccggtaccccatgtcctgggtcagacaggccccggggaaagggcttgaatgggtgtccgggatctcggactccggtgtcagcacttactacgccgactccgccaagggacgcttcaccatttcccgggacaactcgaagaacaccctgttcctccaaatgagctccctccgggacgaggatactgcagtgtactactgcgtgacccgcgccgggtccgaggcgtctgacatttggggacagggcactatggtcaccgtgtcgtccggcggagggggctcgggaggcggtggcagcggaggaggagggtccgagatcgtgctgacccaatccccggccaccctctcgctgagccctggagaaagggcaaccttgtcctgtcgcgcgagccagtccgtgagcaactccctggcctggtaccagcagaagcccggacaggctccgagacttctgatctacgacgcttcgagccgggccactggaatccccgaccgcttttcggggtccggctcaggaaccgatttcaccctgacaatctcacggctggagccagaggatttcgccatctattactgccagcagttcggtacttcctccggcctgactttcggaggcggcacgaagctcgaaatcaagaccactaccccagcaccgaggccacccaccccggctcctaccatcgcctcccagcctctgtccctgcgtccggaggcatgtagacccgcagctggtggggccgtgcatacccggggtcttgacttcgcctgcgatatctacatttgggcccctctggctggtacttgcggggtcctgctgctttcactcgtgatcactctttactgtaagcgcggtcggaagaagctgctgtacatctttaagcaacccttcatgaggcctgtgcagactactcaagaggaggacggctgttcatgccggttcccagaggaggaggaaggcggctgcgaactgcgcgtgaaattcagccgcagcgcagatgctccagcctacaagcaggggcagaaccagctctacaacgaactcaatcttggtcggagagaggagtacgacgtgctggacaagcggagaggacgggacccagaaatgggcgggaagccgcgcagaaagaatccccaagagggcctgtacaacgagctccaaaaggataagatggcagaagcctatagcgagattggtatgaaaggggaacgcagaagaggcaaaggccacgacggactgtaccagggactcagcaccgccaccaaggacacctatgacgctcttcacatgcaggccctgccgcctcgg

SEQ ID NO: 1117 - protein, 248 aa, synthetic construct
  REGION 1..248: note = source = /note="Description of Artificial Sequence: Synthetic polypeptide"
QVQLVESGGGLVQPGGSLRLSCAASGFTFSSYAMSWVRQAPGKGLEWVSAISGSGGSTYYADSVKGRFTISRDNAKNSLYLQMNSLRAEDTAIYYCARATYKRELRYYYGMDVWGQGTMVTVSSGGGGSGGGGSGGGGSEIVMTQSPGTVSLSPGERATLSCRASQSVSSSFLAWYQQKPGQAPRLLIYGASSRATGIPDRFSGSGSGTDFTLTISRLEPEDSAVYYCQQYHSSPSWTFGQGTRLEIK

SEQ ID NO: 1118 - DNA, 744 bp, synthetic construct
  misc_feature 1..744: note = source = /note="Description of Artificial Sequence: Synthetic polynucleotide"
  source 1..744: mol_type = other DNA
caagtgcagctcgtggaatcgggtggcggactggtgcagccggggggctcacttagactgtcctgcgcggccagcggattcactttctcctcctacgccatgtcctgggtcagacaggcccctggaaagggcctggaatgggtgtccgcaatcagcggcagcggcggctcgacctattacgcggattcagtgaagggcagattcaccatttcccgggacaacgccaagaactccttgtaccttcaaatgaactccctccgcgcggaagataccgcaatctactactgcgctcgggccacttacaagagggaactgcgctactactacgggatggacgtctggggccagggaaccatggtcaccgtgtccagcggaggaggaggatcgggaggaggcggtagcgggggtggagggtcggagatcgtgatgacccagtcccccggcactgtgtcgctgtcccccggcgaacgggccaccctgtcatgtcgggccagccagtcagtgtcgtcaagcttcctcgcctggtaccagcagaaaccgggacaagctccccgcctgctgatctacggagccagcagccgggccaccggtattcctgaccggttctccggttcggggtccgggaccgactttactctgactatctctcgcctcgagccagaggactccgccgtgtattactgccagcagtaccactcctccccgtcctggacgttcggacagggcacaaggctggagattaag

SEQ ID NO: 1119 - protein, 124 aa, synthetic construct
  REGION 1..124: note = source = /note="Description of Artificial Sequence: Synthetic polypeptide"
QVQLVESGGGLVQPGGSLRLSCAASGFTFSSYAMSWVRQAPGKGLEWVSAISGSGGSTYYADSVKGRFTISRDNAKNSLYLQMNSLRAEDTAIYYCARATYKRELRYYYGMDVWGQGTMVTVSS

SEQ ID NO: 1120 - protein, 109 aa, synthetic construct
  REGION 1..109: note = source = /note="Description of Artificial Sequence: Synthetic polypeptide"
EIVMTQSPGTVSLSPGERATLSCRASQSVSSSFLAWYQQKPGQAPRLLIYGASSRATGIPDRFSGSGSGTDFTLTISRLEPEDSAVYYCQQYHSSPSWTFGQGTRLEIK

SEQ ID NO: 1121 - protein, 492 aa, synthetic construct
  REGION 1..492: note = source = /note="Description of Artificial Sequence: Synthetic polypeptide"
MALPVTALLLPLALLLHAARPQVQLVESGGGLVQPGGSLRLSCAASGFTFSSYAMSWVRQAPGKGLEWVSAISGSGGSTYYADSVKGRFTISRDNAKNSLYLQMNSLRAEDTAIYYCARATYKRELRYYYGMDVWGQGTMVTVSSGGGGSGGGGSGGGGSEIVMTQSPGTVSLSPGERATLSCRASQSVSSSFLAWYQQKPGQAPRLLIYGASSRATGIPDRFSGSGSGTDFTLTISRLEPEDSAVYYCQQYHSSPSWTFGQGTRLEIKTTTPAPRPPTPAPTIASQPLSLRPEACRPAAGGAVHTRGLDFACDIYIWAPLAGTCGVLLLSLVITLYCKRGRKKLLYIFKQPFMRPVQTTQEEDGCSCRFPEEEEGGCELRVKFSRSADAPAYKQGQNQLYNELNLGRREEYDVLDKRRGRDPEMGGKPRRKNPQEGLYNELQKDKMAEAYSEIGMKGERRRGKGHDGLYQGLSTATKDTYDALHMQALPPR

SEQ ID NO: 1122 - DNA, 1476 bp, synthetic construct
  misc_feature 1..1476: note = source = /note="Description of Artificial Sequence: Synthetic polynucleotide"
  source 1..1476: mol_type = other DNA
atggccctccctgtcaccgccctgctgcttccgctggctcttctgctccacgccgctcggccccaagtgcagctcgtggaatcgggtggcggactggtgcagccggggggctcacttagactgtcctgcgcggccagcggattcactttctcctcctacgccatgtcctgggtcagacaggcccctggaaagggcctggaatgggtgtccgcaatcagcggcagcggcggctcgacctattacgcggattcagtgaagggcagattcaccatttcccgggacaacgccaagaactccttgtaccttcaaatgaactccctccgcgcggaagataccgcaatctactactgcgctcgggccacttacaagagggaactgcgctactactacgggatggacgtctggggccagggaaccatggtcaccgtgtccagcggaggaggaggatcgggaggaggcggtagcgggggtggagggtcggagatcgtgatgacccagtcccccggcactgtgtcgctgtcccccggcgaacgggccaccctgtcatgtcgggccagccagtcagtgtcgtcaagcttcctcgcctggtaccagcagaaaccgggacaagctccccgcctgctgatctacggagccagcagccgggccaccggtattcctgaccggttctccggttcggggtccgggaccgactttactctgactatctctcgcctcgagccagaggactccgccgtgtattactgccagcagtaccactcctccccgtcctggacgttcggacagggcacaaggctggagattaagaccactaccccagcaccgaggccacccaccccggctcctaccatcgcctcccagcctctgtccctgcgtccggaggcatgtagacccgcagctggtggggccgtgcatacccggggtcttgacttcgcctgcgatatctacatttgggcccctctggctggtacttgcggggtcctgctgctttcactcgtgatcactctttactgtaagcgcggtcggaagaagctgctgtacatctttaagcaacccttcatgaggcctgtgcagactactcaagaggaggacggctgttcatgccggttcccagaggaggaggaaggcggctgcgaactgcgcgtgaaattcagccgcagcgcagatgctccagcctacaagcaggggcagaaccagctctacaacgaactcaatcttggtcggagagaggagtacgacgtgctggacaagcggagaggacgggacccagaaatgggcgggaagccgcgcagaaagaatccccaagagggcctgtacaacgagctccaaaaggataagatggcagaagcctatagcgagattggtatgaaaggggaacgcagaagaggcaaaggccacgacggactgtaccagggactcagcaccgccaccaaggacacctatgacgctcttcacatgcaggccctgccgcctcgg

SEQ ID NO: 1123 - protein, 248 aa, synthetic construct
  REGION 1..248: note = source = /note="Description of Artificial Sequence: Synthetic polypeptide"
EVQLVETGGGLVQPGGSLRLSCAASGFTFSSYAMSWVRQAPGKGLEWVSAISGSGGSTYYADSVKGRFTISRDNSKNTLYLQMNTLKAEDTAVYYCARATYKRELRYYYGMDVWGQGTTVTVSSGGGGSGGGGSGGGGSEIVLTQSPSTLSLSPGESATLSCRASQSVSTTFLAWYQQKPGQAPRLLIYGSSNRATGIPDRFSGSGSGTDFTLTIRRLEPEDFAVYYCQQYHSSPSWTFGQGTKVEIK

SEQ ID NO: 1124 - DNA, 744 bp, synthetic construct
  misc_feature 1..744: note = source = /note="Description of Artificial Sequence: Synthetic polynucleotide"
  source 1..744: mol_type = other DNA
gaggtgcagcttgtggaaaccggtggcggactggtgcagcccggaggaagcctcaggctgtcctgcgccgcgtccggcttcaccttctcctcgtacgccatgtcctgggtccgccaggcccccggaaagggcctggaatgggtgtccgccatctctggaagcggaggttccacgtactacgcggacagcgtcaagggaaggttcacaatctcccgcgataattcgaagaacactctgtaccttcaaatgaacaccctgaaggccgaggacactgctgtgtactactgcgcacgggccacctacaagagagagctccggtactactacggaatggacgtctggggccagggaactactgtgaccgtgtcctcgggagggggtggctccggggggggcggctccggcggaggcggttccgagattgtgctgacccagtcaccttcaactctgtcgctgtccccgggagagagcgctactctgagctgccgggccagccagtccgtgtccaccaccttcctcgcctggtatcagcagaagccggggcaggcaccacggctcttgatctacgggtcaagcaacagagcgaccggaattcctgaccgcttctcggggagcggttcaggcaccgacttcaccctgactatccggcgcctggaacccgaagatttcgccgtgtattactgtcaacagtaccactcctcgccgtcctggacctttggccaaggaaccaaagtggaaatcaag

SEQ ID NO: 1125 - protein, 124 aa, synthetic construct
  REGION 1..124: note = source = /note="Description of Artificial Sequence: Synthetic polypeptide"
EVQLVETGGGLVQPGGSLRLSCAASGFTFSSYAMSWVRQAPGKGLEWVSAISGSGGSTYYADSVKGRFTISRDNSKNTLYLQMNTLKAEDTAVYYCARATYKRELRYYYGMDVWGQGTTVTVSS

SEQ ID NO: 1126 - protein, 109 aa, synthetic construct
  REGION 1..109: note = source = /note="Description of Artificial Sequence: Synthetic polypeptide"
EIVLTQSPSTLSLSPGESATLSCRASQSVSTTFLAWYQQKPGQAPRLLIYGSSNRATGIPDRFSGSGSGTDFTLTIRRLEPEDFAVYYCQQYHSSPSWTFGQGTKVEIK

SEQ ID NO: 1127 - protein, 492 aa, synthetic construct
  REGION 1..492: note = source = /note="Description of Artificial Sequence: Synthetic polypeptide"
MALPVTALLLPLALLLHAARPEVQLVETGGGLVQPGGSLRLSCAASGFTFSSYAMSWVRQAPGKGLEWVSAISGSGGSTYYADSVKGRFTISRDNSKNTLYLQMNTLKAEDTAVYYCARATYKRELRYYYGMDVWGQGTTVTVSSGGGGSGGGGSGGGGSEIVLTQSPSTLSLSPGESATLSCRASQSVSTTFLAWYQQKPGQAPRLLIYGSSNRATGIPDRFSGSGSGTDFTLTIRRLEPEDFAVYYCQQYHSSPSWTFGQGTKVEIKTTTPAPRPPTPAPTIASQPLSLRPEACRPAAGGAVHTRGLDFACDIYIWAPLAGTCGVLLLSLVITLYCKRGRKKLLYIFKQPFMRPVQTTQEEDGCSCRFPEEEEGGCELRVKFSRSADAPAYKQGQNQLYNELNLGRREEYDVLDKRRGRDPEMGGKPRRKNPQEGLYNELQKDKMAEAYSEIGMKGERRRGKGHDGLYQGLSTATKDTYDALHMQALPPR

SEQ ID NO: 1128 - DNA, 1476 bp, synthetic construct
  misc_feature 1..1476: note = source = /note="Description of Artificial Sequence: Synthetic polynucleotide"
  source 1..1476: mol_type = other DNA
atggccctccctgtcaccgccctgctgcttccgctggctcttctgctccacgccgctcggcccgaggtgcagcttgtggaaaccggtggcggactggtgcagcccggaggaagcctcaggctgtcctgcgccgcgtccggcttcaccttctcctcgtacgccatgtcctgggtccgccaggcccccggaaagggcctggaatgggtgtccgccatctctggaagcggaggttccacgtactacgcggacagcgtcaagggaaggttcacaatctcccgcgataattcgaagaacactctgtaccttcaaatgaacaccctgaaggccgaggacactgctgtgtactactgcgcacgggccacctacaagagagagctccggtactactacggaatggacgtctggggccagggaactactgtgaccgtgtcctcgggagggggtggctccggggggggcggctccggcggaggcggttccgagattgtgctgacccagtcaccttcaactctgtcgctgtccccgggagagagcgctactctgagctgccgggccagccagtccgtgtccaccaccttcctcgcctggtatcagcagaagccggggcaggcaccacggctcttgatctacgggtcaagcaacagagcgaccggaattcctgaccgcttctcggggagcggttcaggcaccgacttcaccctgactatccggcgcctggaacccgaagatttcgccgtgtattactgtcaacagtaccactcctcgccgtcctggacctttggccaaggaaccaaagtggaaatcaagaccactaccccagcaccgaggccacccaccccggctcctaccatcgcctcccagcctctgtccctgcgtccggaggcatgtagacccgcagctggtggggccgtgcatacccggggtcttgacttcgcctgcgatatctacatttgggcccctctggctggtacttgcggggtcctgctgctttcactcgtgatcactctttactgtaagcgcggtcggaagaagctgctgtacatctttaagcaacccttcatgaggcctgtgcagactactcaagaggaggacggctgttcatgccggttcccagaggaggaggaaggcggctgcgaactgcgcgtgaaattcagccgcagcgcagatgctccagcctacaagcaggggcagaaccagctctacaacgaactcaatcttggtcggagagaggagtacgacgtgctggacaagcggagaggacgggacccagaaatgggcgggaagccgcgcagaaagaatccccaagagggcctgtacaacgagctccaaaaggataagatggcagaagcctatagcgagattggtatgaaaggggaacgcagaagaggcaaaggccacgacggactgtaccagggactcagcaccgccaccaaggacacctatgacgctcttcacatgcaggccctgccgcctcgg

SEQ ID NO: 1129 - protein, 239 aa, synthetic construct
  REGION 1..239: note = source = /note="Description of Artificial Sequence: Synthetic polypeptide"
EVQLVETGGGLVQPGRSLRLSCAASGFTFDDYAMHWVRQAPGKGLEWVSGISWNSGSIGYADSVKGRFTISRDNAKNSLYLQMNSLRDEDTAVYYCARVGKAVPDVWGQGTTVTVSSGGGGSGGGGSGGGGSDIVMTQTPSSLSASVGDRVTITCRASQSISSYLNWYQQKPGKAPKLLIYAASSLQSGVPSRFSGSGSGTDFTLTISSLQPEDFATYYCQQSYSTPYSFGQGTRLEIK

SEQ ID NO: 1130 - DNA, 717 bp, synthetic construct
  misc_feature 1..717: note = source = /note="Description of Artificial Sequence: Synthetic polynucleotide"
  source 1..717: mol_type = other DNA
gaagtgcagctcgtggaaactggaggtggactcgtgcagcctggacggtcgctgcggctgagctgcgctgcatccggcttcaccttcgacgattatgccatgcactgggtcagacaggcgccagggaagggacttgagtgggtgtccggtatcagctggaatagcggctcaatcggatacgcggactccgtgaagggaaggttcaccatttcccgcgacaacgccaagaactccctgtacttgcaaatgaacagcctccgggatgaggacactgccgtgtactactgcgcccgcgtcggaaaagctgtgcccgacgtctggggccagggaaccactgtgaccgtgtccagcggcgggggtggatcgggcggtggagggtccggtggagggggctcagatattgtgatgacccagaccccctcgtccctgtccgcctcggtcggcgaccgcgtgactatcacatgtagagcctcgcagagcatctccagctacctgaactggtatcagcagaagccggggaaggccccgaagctcctgatctacgcggcatcatcactgcaatcgggagtgccgagccggttttccgggtccggctccggcaccgacttcacgctgaccatttcttccctgcaacccgaggacttcgccacttactactgccagcagtcctactccaccccttactccttcggccaaggaaccaggctggaaatcaag

SEQ ID NO: 1131 - protein, 117 aa, synthetic construct
  REGION 1..117: note = source = /note="Description of Artificial Sequence: Synthetic polypeptide"
EVQLVETGGGLVQPGRSLRLSCAASGFTFDDYAMHWVRQAPGKGLEWVSGISWNSGSIGYADSVKGRFTISRDNAKNSLYLQMNSLRDEDTAVYYCARVGKAVPDVWGQGTTVTVSS

SEQ ID NO: 1132 - protein, 107 aa, synthetic construct
  REGION 1..107: note = source = /note="Description of Artificial Sequence: Synthetic polypeptide"
DIVMTQTPSSLSASVGDRVTITCRASQSISSYLNWYQQKPGKAPKLLIYAASSLQSGVPSRFSGSGSGTDFTLTISSLQPEDFATYYCQQSYSTPYSFGQGTRLEIK

SEQ ID NO: 1133 - protein, 483 aa, synthetic construct
  REGION 1..483: note = source = /note="Description of Artificial Sequence: Synthetic polypeptide"
MALPVTALLLPLALLLHAARPEVQLVETGGGLVQPGRSLRLSCAASGFTFDDYAMHWVRQAPGKGLEWVSGISWNSGSIGYADSVKGRFTISRDNAKNSLYLQMNSLRDEDTAVYYCARVGKAVPDVWGQGTTVTVSSGGGGSGGGGSGGGGSDIVMTQTPSSLSASVGDRVTITCRASQSISSYLNWYQQKPGKAPKLLIYAASSLQSGVPSRFSGSGSGTDFTLTISSLQPEDFATYYCQQSYSTPYSFGQGTRLEIKTTTPAPRPPTPAPTIASQPLSLRPEACRPAAGGAVHTRGLDFACDIYIWAPLAGTCGVLLLSLVITLYCKRGRKKLLYIFKQPFMRPVQTTQEEDGCSCRFPEEEEGGCELRVKFSRSADAPAYKQGQNQLYNELNLGRREEYDVLDKRRGRDPEMGGKPRRKNPQEGLYNELQKDKMAEAYSEIGMKGERRRGKGHDGLYQGLSTATKDTYDALHMQALPPR

SEQ ID NO: 1134 - DNA, 1449 bp, synthetic construct
  misc_feature 1..1449: note = source = /note="Description of Artificial Sequence: Synthetic polynucleotide"
  source 1..1449: mol_type = other DNA
atggccctccctgtcaccgccctgctgcttccgctggctcttctgctccacgccgctcggcccgaagtgcagctcgtggaaactggaggtggactcgtgcagcctggacggtcgctgcggctgagctgcgctgcatccggcttcaccttcgacgattatgccatgcactgggtcagacaggcgccagggaagggacttgagtgggtgtccggtatcagctggaatagcggctcaatcggatacgcggactccgtgaagggaaggttcaccatttcccgcgacaacgccaagaactccctgtacttgcaaatgaacagcctccgggatgaggacactgccgtgtactactgcgcccgcgtcggaaaagctgtgcccgacgtctggggccagggaaccactgtgaccgtgtccagcggcgggggtggatcgggcggtggagggtccggtggagggggctcagatattgtgatgacccagaccccctcgtccctgtccgcctcggtcggcgaccgcgtgactatcacatgtagagcctcgcagagcatctccagctacctgaactggtatcagcagaagccggggaaggccccgaagctcctgatctacgcggcatcatcactgcaatcgggagtgccgagccggttttccgggtccggctccggcaccgacttcacgctgaccatttcttccctgcaacccgaggacttcgccacttactactgccagcagtcctactccaccccttactccttcggccaaggaaccaggctggaaatcaagaccactaccccagcaccgaggccacccaccccggctcctaccatcgcctcccagcctctgtccctgcgtccggaggcatgtagacccgcagctggtggggccgtgcatacccggggtcttgacttcgcctgcgatatctacatttgggcccctctggctggtacttgcggggtcctgctgctttcactcgtgatcactctttactgtaagcgcggtcggaagaagctgctgtacatctttaagcaacccttcatgaggcctgtgcagactactcaagaggaggacggctgttcatgccggttcccagaggaggaggaaggcggctgcgaactgcgcgtgaaattcagccgcagcgcagatgctccagcctacaagcaggggcagaaccagctctacaacgaactcaatcttggtcggagagaggagtacgacgtgctggacaagcggagaggacgggacccagaaatgggcgggaagccgcgcagaaagaatccccaagagggcctgtacaacgagctccaaaaggataagatggcagaagcctatagcgagattggtatgaaaggggaacgcagaagaggcaaaggccacgacggactgtaccagggactcagcaccgccaccaaggacacctatgacgctcttcacatgcaggccctgccgcctcgg

SEQ ID NO: 1135 - protein, 246 aa, synthetic construct
  REGION 1..246: note = source = /note="Description of Artificial Sequence: Synthetic polypeptide"
EVQLVESGGGLVQPGRSLRLSCTASGFTFDDYAMHWVRQRPGKGLEWVASINWKGNSLAYGDSVKGRFAISRDNAKNTVFLQMNSLRTEDTAVYYCASHQGVAYYNYAMDVWGRGTLVTVSSGGGGSGGGGSGGGGSEIVLTQSPGTLSLSPGERATLSCRATQSIGSSFLAWYQQRPGQAPRLLIYGASQRATGIPDRFSGRGSGTDFTLTISRVEPEDSAVYYCQHYESSPSWTFGQGTKVEIK

SEQ ID NO: 1136 - DNA, 738 bp, synthetic construct
  misc_feature 1..738: note = source = /note="Description of Artificial Sequence: Synthetic polynucleotide"
  source 1..738: mol_type = other DNA
gaagtgcagctcgtggagagcgggggaggattggtgcagcccggaaggtccctgcggctctcctgcactgcgtctggcttcaccttcgacgactacgcgatgcactgggtcagacagcgcccgggaaagggcctggaatgggtcgcctcaatcaactggaagggaaactccctggcctatggcgacagcgtgaagggccgcttcgccatttcgcgcgacaacgccaagaacaccgtgtttctgcaaatgaattccctgcggaccgaggataccgctgtgtactactgcgccagccaccagggcgtggcatactataactacgccatggacgtgtggggaagagggacgctcgtcaccgtgtcctccgggggcggtggatcgggtggaggaggaagcggtggcgggggcagcgaaatcgtgctgactcagagcccgggaactctttcactgtccccgggagaacgggccactctctcgtgccgggccacccagtccatcggctcctccttccttgcctggtaccagcagaggccaggacaggcgccccgcctgctgatctacggtgcttcccaacgcgccactggcattcctgaccggttcagcggcagagggtcgggaaccgatttcacactgaccatttcccgggtggagcccgaagattcggcagtctactactgtcagcattacgagtcctccccttcatggaccttcggtcaagggaccaaagtggagatcaag

SEQ ID NO: 1137 - protein, 122 aa, synthetic construct
  REGION 1..122: note = source = /note="Description of Artificial Sequence: Synthetic polypeptide"
EVQLVESGGGLVQPGRSLRLSCTASGFTFDDYAMHWVRQRPGKGLEWVASINWKGNSLAYGDSVKGRFAISRDNAKNTVFLQMNSLRTEDTAVYYCASHQGVAYYNYAMDVWGRGTLVTVSS

SEQ ID NO: 1138 - protein, 109 aa, synthetic construct
  REGION 1..109: note = source = /note="Description of Artificial Sequence: Synthetic polypeptide"
EIVLTQSPGTLSLSPGERATLSCRATQSIGSSFLAWYQQRPGQAPRLLIYGASQRATGIPDRFSGRGSGTDFTLTISRVEPEDSAVYYCQHYESSPSWTFGQGTKVEIK

SEQ ID NO: 1139 - protein, 490 aa, synthetic construct
  REGION 1..490: note = source = /note="Description of Artificial Sequence: Synthetic polypeptide"
MALPVTALLLPLALLLHAARPEVQLVESGGGLVQPGRSLRLSCTASGFTFDDYAMHWVRQRPGKGLEWVASINWKGNSLAYGDSVKGRFAISRDNAKNTVFLQMNSLRTEDTAVYYCASHQGVAYYNYAMDVWGRGTLVTVSSGGGGSGGGGSGGGGSEIVLTQSPGTLSLSPGERATLSCRATQSIGSSFLAWYQQRPGQAPRLLIYGASQRATGIPDRFSGRGSGTDFTLTISRVEPEDSAVYYCQHYESSPSWTFGQGTKVEIKTTTPAPRPPTPAPTIASQPLSLRPEACRPAAGGAVHTRGLDFACDIYIWAPLAGTCGVLLLSLVITLYCKRGRKKLLYIFKQPFMRPVQTTQEEDGCSCRFPEEEEGGCELRVKFSRSADAPAYKQGQNQLYNELNLGRREEYDVLDKRRGRDPEMGGKPRRKNPQEGLYNELQKDKMAEAYSEIGMKGERRRGKGHDGLYQGLSTATKDTYDALHMQALPPR

SEQ ID NO: 1140 - DNA, 1470 bp, synthetic construct
  misc_feature 1..1470: note = source = /note="Description of Artificial Sequence: Synthetic polynucleotide"
  source 1..1470: mol_type = other DNA
atggccctccctgtcaccgccctgctgcttccgctggctcttctgctccacgccgctcggcccgaagtgcagctcgtggagagcgggggaggattggtgcagcccggaaggtccctgcggctctcctgcactgcgtctggcttcaccttcgacgactacgcgatgcactgggtcagacagcgcccgggaaagggcctggaatgggtcgcctcaatcaactggaagggaaactccctggcctatggcgacagcgtgaagggccgcttcgccatttcgcgcgacaacgccaagaacaccgtgtttctgcaaatgaattccctgcggaccgaggataccgctgtgtactactgcgccagccaccagggcgtggcatactataactacgccatggacgtgtggggaagagggacgctcgtcaccgtgtcctccgggggcggtggatcgggtggaggaggaagcggtggcgggggcagcgaaatcgtgctgactcagagcccgggaactctttcactgtccccgggagaacgggccactctctcgtgccgggccacccagtccatcggctcctccttccttgcctggtaccagcagaggccaggacaggcgccccgcctgctgatctacggtgcttcccaacgcgccactggcattcctgaccggttcagcggcagagggtcgggaaccgatttcacactgaccatttcccgggtggagcccgaagattcggcagtctactactgtcagcattacgagtcctccccttcatggaccttcggtcaagggaccaaagtggagatcaagaccactaccccagcaccgaggccacccaccccggctcctaccatcgcctcccagcctctgtccctgcgtccggaggcatgtagacccgcagctggtggggccgtgcatacccggggtcttgacttcgcctgcgatatctacatttgggcccctctggctggtacttgcggggtcctgctgctttcactcgtgatcactctttactgtaagcgcggtcggaagaagctgctgtacatctttaagcaacccttcatgaggcctgtgcagactactcaagaggaggacggctgttcatgccggttcccagaggaggaggaaggcggctgcgaactgcgcgtgaaattcagccgcagcgcagatgctccagcctacaagcaggggcagaaccagctctacaacgaactcaatcttggtcggagagaggagtacgacgtgctggacaagcggagaggacgggacccagaaatgggcgggaagccgcgcagaaagaatccccaagagggcctgtacaacgagctccaaaaggataagatggcagaagcctatagcgagattggtatgaaaggggaacgcagaagaggcaaaggccacgacggactgtaccagggactcagcaccgccaccaaggacacctatgacgctcttcacatgcaggccctgccgcctcgg

SEQ ID NO: 1141 - protein, 241 aa, synthetic construct
  REGION 1..241: note = source = /note="Description of Artificial Sequence: Synthetic polypeptide"
EVQLVESGGGLVQPGGSLRLSCAASGFTFSSYAMSWVRQAPGKGLEWVSAISGSGGSTYYADSVKGRFTISRDNSKNTLYLQMNSLRAEDTAVYYCAKVVRDGMDVWGQGTTVTVSSGGGGSGGGGSGGGGSEIVLTQSPATLSLSPGERATLSCRASQSVSSSYLAWYQQKPGQAPRLLIYGASSRATGIPDRFSGNGSGTDFTLTISRLEPEDFAVYYCQQYGSPPRFTFGPGTKVDIK

SEQ ID NO: 1142 - DNA, 723 bp, synthetic construct
  misc_feature 1..723: note = source = /note="Description of Artificial Sequence: Synthetic polynucleotide"
  source 1..723: mol_type = other DNA
gaggtgcagttggtcgaaagcgggggcgggcttgtgcagcctggcggatcactgcggctgtcctgcgcggcatcaggcttcacgttttcttcctacgccatgtcctgggtgcgccaggcccctggaaagggactggaatgggtgtccgcgatttcggggtccggcgggagcacctactacgccgattccgtgaagggccgcttcactatctcgcgggacaactccaagaacaccctctacctccaaatgaatagcctgcgggccgaggataccgccgtctactattgcgctaaggtcgtgcgcgacggaatggacgtgtggggacagggtaccaccgtgacagtgtcctcggggggaggcggtagcggcggaggaggaagcggtggtggaggttccgagattgtgctgactcaatcacccgcgaccctgagcctgtcccccggcgaaagggccactctgtcctgtcgggccagccaatcagtctcctcctcgtacctggcctggtaccagcagaagccaggacaggctccgagactccttatctatggcgcatcctcccgcgccaccggaatcccggataggttctcgggaaacggatcggggaccgacttcactctcaccatctcccggctggaaccggaggacttcgccgtgtactactgccagcagtacggcagcccgcctagattcactttcggccccggcaccaaagtggacatcaag

SEQ ID NO: 1143 - protein, 117 aa, synthetic construct
  REGION 1..117: note = source = /note="Description of Artificial Sequence: Synthetic polypeptide"
EVQLVESGGGLVQPGGSLRLSCAASGFTFSSYAMSWVRQAPGKGLEWVSAISGSGGSTYYADSVKGRFTISRDNSKNTLYLQMNSLRAEDTAVYYCAKVVRDGMDVWGQGTTVTVSS

SEQ ID NO: 1144 - protein, 109 aa, synthetic construct
  REGION 1..109: note = source = /note="Description of Artificial Sequence: Synthetic polypeptide"
EIVLTQSPATLSLSPGERATLSCRASQSVSSSYLAWYQQKPGQAPRLLIYGASSRATGIPDRFSGNGSGTDFTLTISRLEPEDFAVYYCQQYGSPPRFTFGPGTKVDIK

SEQ ID NO: 1145 - protein, 485 aa, synthetic construct
  REGION 1..485: note = source = /note="Description of Artificial Sequence: Synthetic polypeptide"
MALPVTALLLPLALLLHAARPEVQLVESGGGLVQPGGSLRLSCAASGFTFSSYAMSWVRQAPGKGLEWVSAISGSGGSTYYADSVKGRFTISRDNSKNTLYLQMNSLRAEDTAVYYCAKVVRDGMDVWGQGTTVTVSSGGGGSGGGGSGGGGSEIVLTQSPATLSLSPGERATLSCRASQSVSSSYLAWYQQKPGQAPRLLIYGASSRATGIPDRFSGNGSGTDFTLTISRLEPEDFAVYYCQQYGSPPRFTFGPGTKVDIKTTTPAPRPPTPAPTIASQPLSLRPEACRPAAGGAVHTRGLDFACDIYIWAPLAGTCGVLLLSLVITLYCKRGRKKLLYIFKQPFMRPVQTTQEEDGCSCRFPEEEEGGCELRVKFSRSADAPAYKQGQNQLYNELNLGRREEYDVLDKRRGRDPEMGGKPRRKNPQEGLYNELQKDKMAEAYSEIGMKGERRRGKGHDGLYQGLSTATKDTYDALHMQALPPR

SEQ ID NO: 1146 - DNA, 1455 bp, synthetic construct
  misc_feature 1..1455: note = source = /note="Description of Artificial Sequence: Synthetic polynucleotide"
  source 1..1455: mol_type = other DNA
atggccctccctgtcaccgccctgctgcttccgctggctcttctgctccacgccgctcggcccgaggtgcagttggtcgaaagcgggggcgggcttgtgcagcctggcggatcactgcggctgtcctgcgcggcatcaggcttcacgttttcttcctacgccatgtcctgggtgcgccaggcccctggaaagggactggaatgggtgtccgcgatttcggggtccggcgggagcacctactacgccgattccgtgaagggccgcttcactatctcgcgggacaactccaagaacaccctctacctccaaatgaatagcctgcgggccgaggataccgccgtctactattgcgctaaggtcgtgcgcgacggaatggacgtgtggggacagggtaccaccgtgacagtgtcctcggggggaggcggtagcggcggaggaggaagcggtggtggaggttccgagattgtgctgactcaatcacccgcgaccctgagcctgtcccccggcgaaagggccactctgtcctgtcgggccagccaatcagtctcctcctcgtacctggcctggtaccagcagaagccaggacaggctccgagactccttatctatggcgcatcctcccgcgccaccggaatcccggataggttctcgggaaacggatcggggaccgacttcactctcaccatctcccggctggaaccggaggacttcgccgtgtactactgccagcagtacggcagcccgcctagattcactttcggccccggcaccaaagtggacatcaagaccactaccccagcaccgaggccacccaccccggctcctaccatcgcctcccagcctctgtccctgcgtccggaggcatgtagacccgcagctggtggggccgtgcatacccggggtcttgacttcgcctgcgatatctacatttgggcccctctggctggtacttgcggggtcctgctgctttcactcgtgatcactctttactgtaagcgcggtcggaagaagctgctgtacatctttaagcaacccttcatgaggcctgtgcagactactcaagaggaggacggctgttcatgccggttcccagaggaggaggaaggcggctgcgaactgcgcgtgaaattcagccgcagcgcagatgctccagcctacaagcaggggcagaaccagctctacaacgaactcaatcttggtcggagagaggagtacgacgtgctggacaagcggagaggacgggacccagaaatgggcgggaagccgcgcagaaagaatccccaagagggcctgtacaacgagctccaaaaggataagatggcagaagcctatagcgagattggtatgaaaggggaacgcagaagaggcaaaggccacgacggactgtaccagggactcagcaccgccaccaaggacacctatgacgctcttcacatgcaggccctgccgcctcgg

SEQ ID NO: 1147 - protein, 242 aa, synthetic construct
  REGION 1..242: note = source = /note="Description of Artificial Sequence: Synthetic polypeptide"
EVQLLESGGGLVQPGGSLRLSCAASGFTFSSYAMSWVRQAPGKGLEWVSAISGSGGSTYYADSVKGRFTISRDNSKNTLYLQMNSLRAEDTAVYYCAKIPQTGTFDYWGQGTLVTVSSGGGGSGGGGSGGGGSEIVLTQSPGTLSLSPGERATLSCRASQSVSSSYLAWYQQRPGQAPRLLIYGASSRATGIPDRFSGSGSGTDFTLTISRLEPEDFAVYYCQHYGSSPSWTFGQGTRLEIK

SEQ ID NO: 1148 - DNA, 726 bp, synthetic construct
  misc_feature 1..726: note = source = /note="Description of Artificial Sequence: Synthetic polynucleotide"
  source 1..726: mol_type = other DNA
gaagtgcagctgctggagtccggcggtggattggtgcaaccggggggatcgctcagactgtcctgtgcggcgtcaggcttcaccttctcgagctacgccatgtcatgggtcagacaggcccctggaaagggtctggaatgggtgtccgccatttccgggagcgggggatctacatactacgccgatagcgtgaagggccgcttcaccatttcccgggacaactccaagaacactctctatctgcaaatgaactccctccgcgctgaggacactgccgtgtactactgcgccaaaatccctcagaccggcaccttcgactactggggacaggggactctggtcaccgtcagcagcggtggcggaggttcggggggaggaggaagcggcggcggagggtccgagattgtgctgacccagtcacccggcactttgtccctgtcgcctggagaaagggccaccctttcctgccgggcatcccaatccgtgtcctcctcgtacctggcctggtaccagcagaggcccggacaggccccacggcttctgatctacggagcaagcagccgcgcgaccggtatcccggaccggttttcgggctcgggctcaggaactgacttcaccctcaccatctcccgcctggaacccgaagatttcgctgtgtattactgccagcactacggcagctccccgtcctggacgttcggccagggaactcggctggagatcaag

SEQ ID NO: 1149 - protein, 118 aa, synthetic construct
  REGION 1..118: note = source = /note="Description of Artificial Sequence: Synthetic polypeptide"
EVQLLESGGGLVQPGGSLRLSCAASGFTFSSYAMSWVRQAPGKGLEWVSAISGSGGSTYYADSVKGRFTISRDNSKNTLYLQMNSLRAEDTAVYYCAKIPQTGTFDYWGQGTLVTVSS

SEQ ID NO: 1150 - protein, 109 aa, synthetic construct
  REGION 1..109: note = source = /note="Description of Artificial Sequence: Synthetic polypeptide"
EIVLTQSPGTLSLSPGERATLSCRASQSVSSSYLAWYQQRPGQAPRLLIYGASSRATGIPDRFSGSGSGTDFTLTISRLEPEDFAVYYCQHYGSSPSWTFGQGTRLEIK

SEQ ID NO: 1151 - protein, 486 aa, synthetic construct
  REGION 1..486: note = source = /note="Description of Artificial Sequence: Synthetic polypeptide"
MALPVTALLLPLALLLHAARPEVQLLESGGGLVQPGGSLRLSCAASGFTFSSYAMSWVRQAPGKGLEWVSAISGSGGSTYYADSVKGRFTISRDNSKNTLYLQMNSLRAEDTAVYYCAKIPQTGTFDYWGQGTLVTVSSGGGGSGGGGSGGGGSEIVLTQSPGTLSLSPGERATLSCRASQSVSSSYLAWYQQRPGQAPRLLIYGASSRATGIPDRFSGSGSGTDFTLTISRLEPEDFAVYYCQHYGSSPSWTFGQGTRLEIKTTTPAPRPPTPAPTIASQPLSLRPEACRPAAGGAVHTRGLDFACDIYIWAPLAGTCGVLLLSLVITLYCKRGRKKLLYIFKQPFMRPVQTTQEEDGCSCRFPEEEEGGCELRVKFSRSADAPAYKQGQNQLYNELNLGRREEYDVLDKRRGRDPEMGGKPRRKNPQEGLYNELQKDKMAEAYSEIGMKGERRRGKGHDGLYQGLSTATKDTYDALHMQALPPR

SEQ ID NO: 1152 - DNA, 1458 bp, synthetic construct
  misc_feature 1..1458: note = source = /note="Description of Artificial Sequence: Synthetic polynucleotide"
  source 1..1458: mol_type = other DNA
atggccctccctgtcaccgccctgctgcttccgctggctcttctgctccacgccgctcggcccgaagtgcagctgctggagtccggcggtggattggtgcaaccggggggatcgctcagactgtcctgtgcggcgtcaggcttcaccttctcgagctacgccatgtcatgggtcagacaggcccctggaaagggtctggaatgggtgtccgccatttccgggagcgggggatctacatactacgccgatagcgtgaagggccgcttcaccatttcccgggacaactccaagaacactctctatctgcaaatgaactccctccgcgctgaggacactgccgtgtactactgcgccaaaatccctcagaccggcaccttcgactactggggacaggggactctggtcaccgtcagcagcggtggcggaggttcggggggaggaggaagcggcggcggagggtccgagattgtgctgacccagtcacccggcactttgtccctgtcgcctggagaaagggccaccctttcctgccgggcatcccaatccgtgtcctcctcgtacctggcctggtaccagcagaggcccggacaggccccacggcttctgatctacggagcaagcagccgcgcgaccggtatcccggaccggttttcgggctcgggctcaggaactgacttcaccctcaccatctcccgcctggaacccgaagatttcgctgtgtattactgccagcactacggcagctccccgtcctggacgttcggccagggaactcggctggagatcaagaccactaccccagcaccgaggccacccaccccggctcctaccatcgcctcccagcctctgtccctgcgtccggaggcatgtagacccgcagctggtggggccgtgcatacccggggtcttgacttcgcctgcgatatctacatttgggcccctctggctggtacttgcggggtcctgctgctttcactcgtgatcactctttactgtaagcgcggtcggaagaagctgctgtacatctttaagcaacccttcatgaggcctgtgcagactactcaagaggaggacggctgttcatgccggttcccagaggaggaggaaggcggctgcgaactgcgcgtgaaattcagccgcagcgcagatgctccagcctacaagcaggggcagaaccagctctacaacgaactcaatcttggtcggagagaggagtacgacgtgctggacaagcggagaggacgggacccagaaatgggcgggaagccgcgcagaaagaatccccaagagggcctgtacaacgagctccaaaaggataagatggcagaagcctatagcgagattggtatgaaaggggaacgcagaagaggcaaaggccacgacggactgtaccagggactcagcaccgccaccaaggacacctatgacgctcttcacatgcaggccctgccgcctcgg

SEQ ID NO: 1153 - protein, 248 aa, synthetic construct
  REGION 1..248: note = source = /note="Description of Artificial Sequence: Synthetic polypeptide"
EVQLVETGGGLVQPGGSLRLSCAASGFTFSSYAMSWVRQAPGKGLEWVSAISGSGGSTYYADSVKGRFTMSRENDKNSVFLQMNSLRVEDTGVYYCARANYKRELRYYYGMDVWGQGTMVTVSSGGGGSGGGGSGGGGSEIVMTQSPGTLSLSPGESATLSCRASQRVASNYLAWYQHKPGQAPSLLISGASSRATGVPDRFSGSGSGTDFTLAISRLEPEDSAVYYCQHYDSSPSWTFGQGTKVEIK

SEQ ID NO: 1154 - DNA, 744 bp, synthetic construct
  misc_feature 1..744: note = source = /note="Description of Artificial Sequence: Synthetic polynucleotide"
  source 1..744: mol_type = other DNA
gaagtgcaactggtggaaaccggtggaggactcgtgcagcctggcggcagcctccggctgagctgcgccgcttcgggattcaccttttcctcctacgcgatgtcttgggtcagacaggcccccggaaaggggctggaatgggtgtcagccatctccggctccggcggatcaacgtactacgccgactccgtgaaaggccggttcaccatgtcgcgcgagaatgacaagaactccgtgttcctgcaaatgaactccctgagggtggaggacaccggagtgtactattgtgcgcgcgccaactacaagagagagctgcggtactactacggaatggacgtctggggacagggaactatggtgaccgtgtcatccggtggagggggaagcggcggtggaggcagcgggggcgggggttcagaaattgtcatgacccagtccccgggaactctttccctctcccccggggaatccgcgactttgtcctgccgggccagccagcgcgtggcctcgaactacctcgcatggtaccagcataagccaggccaagccccttccctgctgatttccggggctagcagccgcgccactggcgtgccggataggttctcgggaagcggctcgggtaccgatttcaccctggcaatctcgcggctggaaccggaggattcggccgtgtactactgccagcactatgactcatccccctcctggacattcggacagggcaccaaggtcgagatcaag

SEQ ID NO: 1155 - protein, 124 aa, synthetic construct
  REGION 1..124: note = source = /note="Description of Artificial Sequence: Synthetic polypeptide"
EVQLVETGGGLVQPGGSLRLSCAASGFTFSSYAMSWVRQAPGKGLEWVSAISGSGGSTYYADSVKGRFTMSRENDKNSVFLQMNSLRVEDTGVYYCARANYKRELRYYYGMDVWGQGTMVTVSS

SEQ ID NO: 1156 - protein, 109 aa, synthetic construct
  REGION 1..109: note = source = /note="Description of Artificial Sequence: Synthetic polypeptide"
EIVMTQSPGTLSLSPGESATLSCRASQRVASNYLAWYQHKPGQAPSLLISGASSRATGVPDRFSGSGSGTDFTLAISRLEPEDSAVYYCQHYDSSPSWTFGQGTKVEIK

SEQ ID NO: 1157 - protein, 492 aa, synthetic construct
  REGION 1..492: note = source = /note="Description of Artificial Sequence: Synthetic polypeptide"
MALPVTALLLPLALLLHAARPEVQLVETGGGLVQPGGSLRLSCAASGFTFSSYAMSWVRQAPGKGLEWVSAISGSGGSTYYADSVKGRFTMSRENDKNSVFLQMNSLRVEDTGVYYCARANYKRELRYYYGMDVWGQGTMVTVSSGGGGSGGGGSGGGGSEIVMTQSPGTLSLSPGESATLSCRASQRVASNYLAWYQHKPGQAPSLLISGASSRATGVPDRFSGSGSGTDFTLAISRLEPEDSAVYYCQHYDSSPSWTFGQGTKVEIKTTTPAPRPPTPAPTIASQPLSLRPEACRPAAGGAVHTRGLDFACDIYIWAPLAGTCGVLLLSLVITLYCKRGRKKLLYIFKQPFMRPVQTTQEEDGCSCRFPEEEEGGCELRVKFSRSADAPAYKQGQNQLYNELNLGRREEYDVLDKRRGRDPEMGGKPRRKNPQEGLYNELQKDKMAEAYSEIGMKGERRRGKGHDGLYQGLSTATKDTYDALHMQALPPR

SEQ ID NO: 1158 - DNA, 1476 bp, synthetic construct
  misc_feature 1..1476: note = source = /note="Description of Artificial Sequence: Synthetic polynucleotide"
  source 1..1476: mol_type = other DNA
atggccctccctgtcaccgccctgctgcttccgctggctcttctgctccacgccgctcggcccgaagtgcaactggtggaaaccggtggaggactcgtgcagcctggcggcagcctccggctgagctgcgccgcttcgggattcaccttttcctcctacgcgatgtcttgggtcagacaggcccccggaaaggggctggaatgggtgtcagccatctccggctccggcggatcaacgtactacgccgactccgtgaaaggccggttcaccatgtcgcgcgagaatgacaagaactccgtgttcctgcaaatgaactccctgagggtggaggacaccggagtgtactattgtgcgcgcgccaactacaagagagagctgcggtactactacggaatggacgtctggggacagggaactatggtgaccgtgtcatccggtggagggggaagcggcggtggaggcagcgggggcgggggttcagaaattgtcatgacccagtccccgggaactctttccctctcccccggggaatccgcgactttgtcctgccgggccagccagcgcgtggcctcgaactacctcgcatggtaccagcataagccaggccaagccccttccctgctgatttccggggctagcagccgcgccactggcgtgccggataggttctcgggaagcggctcgggtaccgatttcaccctggcaatctcgcggctggaaccggaggattcggccgtgtactactgccagcactatgactcatccccctcctggacattcggacagggcaccaaggtcgagatcaagaccactaccccagcaccgaggccacccaccccggctcctaccatcgcctcccagcctctgtccctgcgtccggaggcatgtagacccgcagctggtggggccgtgcatacccggggtcttgacttcgcctgcgatatctacatttgggcccctctggctggtacttgcggggtcctgctgctttcactcgtgatcactctttactgtaagcgcggtcggaagaagctgctgtacatctttaagcaacccttcatgaggcctgtgcagactactcaagaggaggacggctgttcatgccggttcccagaggaggaggaaggcggctgcgaactgcgcgtgaaattcagccgcagcgcagatgctccagcctacaagcaggggcagaaccagctctacaacgaactcaatcttggtcggagagaggagtacgacgtgctggacaagcggagaggacgggacccagaaatgggcgggaagccgcgcagaaagaatccccaagagggcctgtacaacgagctccaaaaggataagatggcagaagcctatagcgagattggtatgaaaggggaacgcagaagaggcaaaggccacgacggactgtaccagggactcagcaccgccaccaaggacacctatgacgctcttcacatgcaggccctgccgcctcgg

SEQ ID NO: 1159 - protein, 244 aa, synthetic construct
  REGION 1..244: note = source = /note="Description of Artificial Sequence: Synthetic polypeptide"
EVQLLETGGGLVQPGGSLRLSCAASGFSFSSYAMSWVRQAPGKGLEWVSAISGSGGSTYYADSVKGRFTISRDNSKNTLYLQMNSLRAEDTAVYYCAKALVGATGAFDIWGQGTLVTVSSGGGGSGGGGSGGGGSEIVLTQSPGTLSLSPGERATLSCRASQSLSSNFLAWYQQKPGQAPGLLIYGASNWATGTPDRFSGSGSGTDFTLTITRLEPEDFAVYYCQYYGTSPMYTFGQGTKVEIK

SEQ ID NO: 1160 - DNA, 732 bp, synthetic construct
  misc_feature 1..732: note = source = /note="Description of Artificial Sequence: Synthetic polynucleotide"
  source 1..732: mol_type = other DNA
gaagtgcagctgctcgaaaccggtggagggctggtgcagccagggggctccctgaggctttcatgcgccgctagcggattctccttctcctcttacgccatgtcgtgggtccgccaagcccctggaaaaggcctggaatgggtgtccgcgatttccgggagcggaggttcgacctattacgccgactccgtgaagggccgctttaccatctcccgggataactccaagaacactctgtacctccaaatgaactcgctgagagccgaggacaccgccgtgtattactgcgcgaaggcgctggtcggcgcgactggggcattcgacatctggggacagggaactcttgtgaccgtgtcgagcggaggcggcggctccggcggaggagggagcgggggcggtggttccgaaatcgtgttgactcagtccccgggaaccctgagcttgtcacccggggagcgggccactctctcctgtcgcgcctcccaatcgctctcatccaatttcctggcctggtaccagcagaagcccggacaggccccgggcctgctcatctacggcgcttcaaactgggcaacgggaacccctgatcggttcagcggaagcggatcgggtactgactttaccctgaccatcaccagactggaaccggaggacttcgccgtgtactactgccagtactacggcacctcccccatgtacacattcggacagggtaccaaggtcgagattaag

SEQ ID NO: 1161 - protein, 120 aa, synthetic construct
  REGION 1..120: note = source = /note="Description of Artificial Sequence: Synthetic polypeptide"
EVQLLETGGGLVQPGGSLRLSCAASGFSFSSYAMSWVRQAPGKGLEWVSAISGSGGSTYYADSVKGRFTISRDNSKNTLYLQMNSLRAEDTAVYYCAKALVGATGAFDIWGQGTLVTVSS

SEQ ID NO: 1162 - protein, 109 aa, synthetic construct
  REGION 1..109: note = source = /note="Description of Artificial Sequence: Synthetic polypeptide"
EIVLTQSPGTLSLSPGERATLSCRASQSLSSNFLAWYQQKPGQAPGLLIYGASNWATGTPDRFSGSGSGTDFTLTITRLEPEDFAVYYCQYYGTSPMYTFGQGTKVEIK

SEQ ID NO: 1163 - protein, 488 aa, synthetic construct
  REGION 1..488: note = source = /note="Description of Artificial Sequence: Synthetic polypeptide"
MALPVTALLLPLALLLHAARPEVQLLETGGGLVQPGGSLRLSCAASGFSFSSYAMSWVRQAPGKGLEWVSAISGSGGSTYYADSVKGRFTISRDNSKNTLYLQMNSLRAEDTAVYYCAKALVGATGAFDIWGQGTLVTVSSGGGGSGGGGSGGGGSEIVLTQSPGTLSLSPGERATLSCRASQSLSSNFLAWYQQKPGQAPGLLIYGASNWATGTPDRFSGSGSGTDFTLTITRLEPEDFAVYYCQYYGTSPMYTFGQGTKVEIKTTTPAPRPPTPAPTIASQPLSLRPEACRPAAGGAVHTRGLDFACDIYIWAPLAGTCGVLLLSLVITLYCKRGRKKLLYIFKQPFMRPVQTTQEEDGCSCRFPEEEEGGCELRVKFSRSADAPAYKQGQNQLYNELNLGRREEYDVLDKRRGRDPEMGGKPRRKNPQEGLYNELQKDKMAEAYSEIGMKGERRRGKGHDGLYQGLSTATKDTYDALHMQALPPR

SEQ ID NO: 1164 - DNA, 1464 bp, synthetic construct
  misc_feature 1..1464: note = source = /note="Description of Artificial Sequence: Synthetic polynucleotide"
  source 1..1464: mol_type = other DNA
atggccctccctgtcaccgccctgctgcttccgctggctcttctgctccacgccgctcggcccgaagtgcagctgctcgaaaccggtggagggctggtgcagccagggggctccctgaggctttcatgcgccgctagcggattctccttctcctcttacgccatgtcgtgggtccgccaagcccctggaaaaggcctggaatgggtgtccgcgatttccgggagcggaggttcgacctattacgccgactccgtgaagggccgctttaccatctcccgggataactccaagaacactctgtacctccaaatgaactcgctgagagccgaggacaccgccgtgtattactgcgcgaaggcgctggtcggcgcgactggggcattcgacatctggggacagggaactcttgtgaccgtgtcgagcggaggcggcggctccggcggaggagggagcgggggcggtggttccgaaatcgtgttgactcagtccccgggaaccctgagcttgtcacccggggagcgggccactctctcctgtcgcgcctcccaatcgctctcatccaatttcctggcctggtaccagcagaagcccggacaggccccgggcctgctcatctacggcgcttcaaactgggcaacgggaacccctgatcggttcagcggaagcggatcgggtactgactttaccctgaccatcaccagactggaaccggaggacttcgccgtgtactactgccagtactacggcacctcccccatgtacacattcggacagggtaccaaggtcgagattaagaccactaccccagcaccgaggccacccaccccggctcctaccatcgcctcccagcctctgtccctgcgtccggaggcatgtagacccgcagctggtggggccgtgcatacccggggtcttgacttcgcctgcgatatctacatttgggcccctctggctggtacttgcggggtcctgctgctttcactcgtgatcactctttactgtaagcgcggtcggaagaagctgctgtacatctttaagcaacccttcatgaggcctgtgcagactactcaagaggaggacggctgttcatgccggttcccagaggaggaggaaggcggctgcgaactgcgcgtgaaattcagccgcagcgcagatgctccagcctacaagcaggggcagaaccagctctacaacgaactcaatcttggtcggagagaggagtacgacgtgctggacaagcggagaggacgggacccagaaatgggcgggaagccgcgcagaaagaatccccaagagggcctgtacaacgagctccaaaaggataagatggcagaagcctatagcgagattggtatgaaaggggaacgcagaagaggcaaaggccacgacggactgtaccagggactcagcaccgccaccaaggacacctatgacgctcttcacatgcaggccctgccgcctcgg

SEQ ID NO: 1165 - protein, 244 aa, synthetic construct
  REGION 1..244: note = source = /note="Description of Artificial Sequence: Synthetic polypeptide"
EVQLLESGGGLVQPGGSLRLSCAASGFTFSSYAMSWVRQAPGKGLEWVSAISGSGGSTYYADSVKGRFTISRDNSKNTLYLQMNSLRAEDTAVYYCVLWFGEGFDPWGQGTLVTVSSGGGGSGGGGSGGGGSDIVLTQSPLSLPVTPGEPASISCRSSQSLLHSNGYNYLDWYLQKPGQSPQLLIYLGSNRASGVPDRFSGSGSGTDFTLKISRVEAEDVGVYYCMQALQTPLTFGGGTKVDIK

SEQ ID NO: 1166 - DNA, 733 bp, synthetic construct
  misc_feature 1..733: note = source = /note="Description of Artificial Sequence: Synthetic polynucleotide"
  source 1..733: mol_type = other DNA
gaagtgcagctgcttgagagcggtggaggtctggtgcagcccgggggatcactgcgcctgtcctgtgccgcgtccggtttcactttctcctcgtacgccatgtcgtgggtcagacaggcaccgggaaagggactggaatgggtgtcagccatttcgggttcggggggcagcacctactacgctgactccgtgaagggccggttcaccatttcccgcgacaactccaagaacaccttgtacctccaaatgaactccctgcgggccgaagataccgccgtgtattactgcgtgctgtggttcggagagggattcgacccgtggggacaaggaacactcgtgactgtgtcatccggcggaggcggcagcggtggcggcggttccggcggcggcggatctgacatcgtgttgacccagtcccctctgagcctgccggtcactcctggcgaaccagccagcatctcctgccggtcgagccagtccctcctgcactccaatgggtacaactacctcgattggtatctgcaaaagccgggccagagcccccagctgctgatctaccttgggtcaaaccgcgcttccggggtgcctgatagattctccgggtccgggagcggaaccgactttaccctgaaaatctcgagggtggaggccgaggacgtcggagtgtactactgcatgcaggcgctccagactcccctgaccttcggaggaggaacgaaggtcgacatcaaga

SEQ ID NO: 1167 - protein, 117 aa, synthetic construct
  REGION 1..117: note = source = /note="Description of Artificial Sequence: Synthetic polypeptide"
EVQLLESGGGLVQPGGSLRLSCAASGFTFSSYAMSWVRQAPGKGLEWVSAISGSGGSTYYADSVKGRFTISRDNSKNTLYLQMNSLRAEDTAVYYCVLWFGEGFDPWGQGTLVTVSS

SEQ ID NO: 1168 - protein, 112 aa, synthetic construct
  REGION 1..112: note = source = /note="Description of Artificial Sequence: Synthetic polypeptide"
DIVLTQSPLSLPVTPGEPASISCRSSQSLLHSNGYNYLDWYLQKPGQSPQLLIYLGSNRASGVPDRFSGSGSGTDFTLKISRVEAEDVGVYYCMQALQTPLTFGGGTKVDIK

SEQ ID NO: 1169 - protein, 488 aa, synthetic construct
  REGION 1..488: note = source = /note="Description of Artificial Sequence: Synthetic polypeptide"
MALPVTALLLPLALLLHAARPEVQLLESGGGLVQPGGSLRLSCAASGFTFSSYAMSWVRQAPGKGLEWVSAISGSGGSTYYADSVKGRFTISRDNSKNTLYLQMNSLRAEDTAVYYCVLWFGEGFDPWGQGTLVTVSSGGGGSGGGGSGGGGSDIVLTQSPLSLPVTPGEPASISCRSSQSLLHSNGYNYLDWYLQKPGQSPQLLIYLGSNRASGVPDRFSGSGSGTDFTLKISRVEAEDVGVYYCMQALQTPLTFGGGTKVDIKTTTPAPRPPTPAPTIASQPLSLRPEACRPAAGGAVHTRGLDFACDIYIWAPLAGTCGVLLLSLVITLYCKRGRKKLLYIFKQPFMRPVQTTQEEDGCSCRFPEEEEGGCELRVKFSRSADAPAYKQGQNQLYNELNLGRREEYDVLDKRRGRDPEMGGKPRRKNPQEGLYNELQKDKMAEAYSEIGMKGERRRGKGHDGLYQGLSTATKDTYDALHMQALPPR

SEQ ID NO: 1170 - DNA, 1464 bp, synthetic construct
  misc_feature 1..1464: note = source = /note="Description of Artificial Sequence: Synthetic polynucleotide"
  source 1..1464: mol_type = other DNA
atggccctccctgtcaccgccctgctgcttccgctggctcttctgctccacgccgctcggcccgaagtgcagctgcttgagagcggtggaggtctggtgcagcccgggggatcactgcgcctgtcctgtgccgcgtccggtttcactttctcctcgtacgccatgtcgtgggtcagacaggcaccgggaaagggactggaatgggtgtcagccatttcgggttcggggggcagcacctactacgctgactccgtgaagggccggttcaccatttcccgcgacaactccaagaacaccttgtacctccaaatgaactccctgcgggccgaagataccgccgtgtattactgcgtgctgtggttcggagagggattcgacccgtggggacaaggaacactcgtgactgtgtcatccggcggaggcggcagcggtggcggcggttccggcggcggcggatctgacatcgtgttgacccagtcccctctgagcctgccggtcactcctggcgaaccagccagcatctcctgccggtcgagccagtccctcctgcactccaatgggtacaactacctcgattggtatctgcaaaagccgggccagagcccccagctgctgatctaccttgggtcaaaccgcgcttccggggtgcctgatagattctccgggtccgggagcggaaccgactttaccctgaaaatctcgagggtggaggccgaggacgtcggagtgtactactgcatgcaggcgctccagactcccctgaccttcggaggaggaacgaaggtcgacatcaagaccactaccccagcaccgaggccacccaccccggctcctaccatcgcctcccagcctctgtccctgcgtccggaggcatgtagacccgcagctggtggggccgtgcatacccggggtcttgacttcgcctgcgatatctacatttgggcccctctggctggtacttgcggggtcctgctgctttcactcgtgatcactctttactgtaagcgcggtcggaagaagctgctgtacatctttaagcaacccttcatgaggcctgtgcagactactcaagaggaggacggctgttcatgccggttcccagaggaggaggaaggcggctgcgaactgcgcgtgaaattcagccgcagcgcagatgctccagcctacaagcaggggcagaaccagctctacaacgaactcaatcttggtcggagagaggagtacgacgtgctggacaagcggagaggacgggacccagaaatgggcgggaagccgcgcagaaagaatccccaagagggcctgtacaacgagctccaaaaggataagatggcagaagcctatagcgagattggtatgaaaggggaacgcagaagaggcaaaggccacgacggactgtaccagggactcagcaccgccaccaaggacacctatgacgctcttcacatgcaggccctgccgcctcgg

SEQ ID NO: 1171 - protein, 251 aa, synthetic construct
  REGION 1..251: note = source = /note="Description of Artificial Sequence: Synthetic polypeptide"
QVQLVESGGGLVQPGGSLRLSCAASGFTFSSYAMSWVRQAPGKGLEWVSAISGSGGSTYYADSVKGRFTISRDNSKNTLYLQMNSLRAEDTAVYYCAKVGYDSSGYYRDYYGMDVWGQGTTVTVSSGGGGSGGGGSGGGGSEIVLTQSPGTLSLSPGERATLSCRASQSVSSSYLAWYQQKPGQAPRLLIYGTSSRATGISDRFSGSGSGTDFTLTISRLEPEDFAVYYCQHYGNSPPKFTFGPGTKLEIK

SEQ ID NO: 1172 - DNA, 753 bp, synthetic construct
  misc_feature 1..753: note = source = /note="Description of Artificial Sequence: Synthetic polynucleotide"
  source 1..753: mol_type = other DNA
caagtgcagctcgtggagtcaggcggaggactggtgcagcccgggggctccctgagactttcctgcgcggcatcgggttttaccttctcctcctatgctatgtcctgggtgcgccaggccccgggaaagggactggaatgggtgtccgcaatcagcggtagcgggggctcaacatactacgccgactccgtcaagggtcgcttcactatttcccgggacaactccaagaataccctgtacctccaaatgaacagcctcagggccgaggatactgccgtgtactactgcgccaaagtcggatacgatagctccggttactaccgggactactacggaatggacgtgtggggacagggcaccaccgtgaccgtgtcaagcggcggaggcggttcaggagggggaggctccggcggtggagggtccgaaatcgtcctgactcagtcgcctggcactctgtcgttgtccccgggggagcgcgctaccctgtcgtgtcgggcgtcgcagtccgtgtcgagctcctacctcgcgtggtaccagcagaagcccggacaggcccctagacttctgatctacggcacttcttcacgcgccaccgggatcagcgacaggttcagcggctccggctccgggaccgacttcaccctgaccattagccggctggagcctgaagatttcgccgtgtattactgccaacactacggaaactcgccgccaaagttcacgttcggacccggaaccaagctggaaatcaag

SEQ ID NO: 1173 - protein, 126 aa, synthetic construct
  REGION 1..126: note = source = /note="Description of Artificial Sequence: Synthetic polypeptide"
QVQLVESGGGLVQPGGSLRLSCAASGFTFSSYAMSWVRQAPGKGLEWVSAISGSGGSTYYADSVKGRFTISRDNSKNTLYLQMNSLRAEDTAVYYCAKVGYDSSGYYRDYYGMDVWGQGTTVTVSS

SEQ ID NO: 1174 - protein, 110 aa, synthetic construct
  REGION 1..110: note = source = /note="Description of Artificial Sequence: Synthetic polypeptide"
EIVLTQSPGTLSLSPGERATLSCRASQSVSSSYLAWYQQKPGQAPRLLIYGTSSRATGISDRFSGSGSGTDFTLTISRLEPEDFAVYYCQHYGNSPPKFTFGPGTKLEIK

SEQ ID NO: 1175 - protein, 495 aa, synthetic construct
  REGION 1..495: note = source = /note="Description of Artificial Sequence: Synthetic polypeptide"
MALPVTALLLPLALLLHAARPQVQLVESGGGLVQPGGSLRLSCAASGFTFSSYAMSWVRQAPGKGLEWVSAISGSGGSTYYADSVKGRFTISRDNSKNTLYLQMNSLRAEDTAVYYCAKVGYDSSGYYRDYYGMDVWGQGTTVTVSSGGGGSGGGGSGGGGSEIVLTQSPGTLSLSPGERATLSCRASQSVSSSYLAWYQQKPGQAPRLLIYGTSSRATGISDRFSGSGSGTDFTLTISRLEPEDFAVYYCQHYGNSPPKFTFGPGTKLEIKTTTPAPRPPTPAPTIASQPLSLRPEACRPAAGGAVHTRGLDFACDIYIWAPLAGTCGVLLLSLVITLYCKRGRKKLLYIFKQPFMRPVQTTQEEDGCSCRFPEEEEGGCELRVKFSRSADAPAYKQGQNQLYNELNLGRREEYDVLDKRRGRDPEMGGKPRRKNPQEGLYNELQKDKMAEAYSEIGMKGERRRGKGHDGLYQGLSTATKDTYDALHMQALPPR

SEQ ID NO: 1176 - DNA, 1485 bp, synthetic construct
  misc_feature 1..1485: note = source = /note="Description of Artificial Sequence: Synthetic polynucleotide"
  source 1..1485: mol_type = other DNA
atggccctccctgtcaccgccctgctgcttccgctggctcttctgctccacgccgctcggccccaagtgcagctcgtggagtcaggcggaggactggtgcagcccgggggctccctgagactttcctgcgcggcatcgggttttaccttctcctcctatgctatgtcctgggtgcgccaggccccgggaaagggactggaatgggtgtccgcaatcagcggtagcgggggctcaacatactacgccgactccgtcaagggtcgcttcactatttcccgggacaactccaagaataccctgtacctccaaatgaacagcctcagggccgaggatactgccgtgtactactgcgccaaagtcggatacgatagctccggttactaccgggactactacggaatggacgtgtggggacagggcaccaccgtgaccgtgtcaagcggcggaggcggttcaggagggggaggctccggcggtggagggtccgaaatcgtcctgactcagtcgcctggcactctgtcgttgtccccgggggagcgcgctaccctgtcgtgtcgggcgtcgcagtccgtgtcgagctcctacctcgcgtggtaccagcagaagcccggacaggcccctagacttctgatctacggcacttcttcacgcgccaccgggatcagcgacaggttcagcggctccggctccgggaccgacttcaccctgaccattagccggctggagcctgaagatttcgccgtgtattactgccaacactacggaaactcgccgccaaagttcacgttcggacccggaaccaagctggaaatcaagaccactaccccagcaccgaggccacccaccccggctcctaccatcgcctcccagcctctgtccctgcgtccggaggcatgtagacccgcagctggtggggccgtgcatacccggggtcttgacttcgcctgcgatatctacatttgggcccctctggctggtacttgcggggtcctgctgctttcactcgtgatcactctttactgtaagcgcggtcggaagaagctgctgtacatctttaagcaacccttcatgaggcctgtgcagactactcaagaggaggacggctgttcatgccggttcccagaggaggaggaaggcggctgcgaactgcgcgtgaaattcagccgcagcgcagatgctccagcctacaagcaggggcagaaccagctctacaacgaactcaatcttggtcggagagaggagtacgacgtgctggacaagcggagaggacgggacccagaaatgggcgggaagccgcgcagaaagaatccccaagagggcctgtacaacgagctccaaaaggataagatggcagaagcctatagcgagattggtatgaaaggggaacgcagaagaggcaaaggccacgacggactgtaccagggactcagcaccgccaccaaggacacctatgacgctcttcacatgcaggccctgccgcctcgg

SEQ ID NO: 1177 - protein, 246 aa, synthetic construct
  REGION 1..246: note = source = /note="Description of Artificial Sequence: Synthetic polypeptide"
EVQLVESGGGLVQPGGSLRLSCAASGFTFSSYAMSWVRQAPGKGLEWVSAISGSGGSTYYADSVKGRFTISRDNSKNTLYLQMNSLRAEDTAVYYCAKMGWSSGYLGAFDIWGQGTTVTVSSGGGGSGGGGSGGGGSEIVLTQSPGTLSLSPGERATLSCRASQSVASSFLAWYQQKPGQAPRLLIYGASGRATGIPDRFSGSGSGTDFTLTISRLEPEDFAVYYCQHYGGSPRLTFGGGTKVDIK

SEQ ID NO: 1178 - DNA, 739 bp, synthetic construct
  misc_feature 1..739: note = source = /note="Description of Artificial Sequence: Synthetic polynucleotide"
  source 1..739: mol_type = other DNA
gaagtccaactggtggagtccgggggagggctcgtgcagcccggaggcagccttcggctgtcgtgcgccgcctccgggttcacgttctcatcctacgcgatgtcgtgggtcagacaggcaccaggaaagggactggaatgggtgtccgccattagcggctccggcggtagcacctactatgccgactcagtgaagggaaggttcactatctcccgcgacaacagcaagaacaccctgtacctccaaatgaactctctgcgggccgaggataccgcggtgtactattgcgccaagatgggttggtccagcggatacttgggagccttcgacatttggggacagggcactactgtgaccgtgtcctccgggggtggcggatcgggaggcggcggctcgggtggagggggttccgaaatcgtgttgacccagtcaccgggaaccctctcgctgtccccgggagaacgggctacactgtcatgtagagcgtcccagtccgtggcttcctcgttcctggcctggtaccagcagaagccgggacaggcaccccgcctgctcatctacggagccagcggccgggcgaccggcatccctgaccgcttctccggttccggctcgggcaccgactttactctgaccattagcaggcttgagcccgaggattttgccgtgtactactgccaacactacggggggagccctcgcctgaccttcggaggcggaactaaggtcgatatcaaaa

SEQ ID NO: 1179 - protein, 122 aa, synthetic construct
  REGION 1..122: note = source = /note="Description of Artificial Sequence: Synthetic polypeptide"
EVQLVESGGGLVQPGGSLRLSCAASGFTFSSYAMSWVRQAPGKGLEWVSAISGSGGSTYYADSVKGRFTISRDNSKNTLYLQMNSLRAEDTAVYYCAKMGWSSGYLGAFDIWGQGTTVTVSS

SEQ ID NO: 1180 - protein, 109 aa, synthetic construct
  REGION 1..109: note = source = /note="Description of Artificial Sequence: Synthetic polypeptide"
EIVLTQSPGTLSLSPGERATLSCRASQSVASSFLAWYQQKPGQAPRLLIYGASGRATGIPDRFSGSGSGTDFTLTISRLEPEDFAVYYCQHYGGSPRLTFGGGTKVDIK

SEQ ID NO: 1181 - protein, 490 aa, synthetic construct
  REGION 1..490: note = source = /note="Description of Artificial Sequence: Synthetic polypeptide"
MALPVTALLLPLALLLHAARPEVQLVESGGGLVQPGGSLRLSCAASGFTFSSYAMSWVRQAPGKGLEWVSAISGSGGSTYYADSVKGRFTISRDNSKNTLYLQMNSLRAEDTAVYYCAKMGWSSGYLGAFDIWGQGTTVTVSSGGGGSGGGGSGGGGSEIVLTQSPGTLSLSPGERATLSCRASQSVASSFLAWYQQKPGQAPRLLIYGASGRATGIPDRFSGSGSGTDFTLTISRLEPEDFAVYYCQHYGGSPRLTFGGGTKVDIKTTTPAPRPPTPAPTIASQPLSLRPEACRPAAGGAVHTRGLDFACDIYIWAPLAGTCGVLLLSLVITLYCKRGRKKLLYIFKQPFMRPVQTTQEEDGCSCRFPEEEEGGCELRVKFSRSADAPAYKQGQNQLYNELNLGRREEYDVLDKRRGRDPEMGGKPRRKNPQEGLYNELQKDKMAEAYSEIGMKGERRRGKGHDGLYQGLSTATKDTYDALHMQALPPR

SEQ ID NO: 1182 - DNA, 1470 bp, synthetic construct
  misc_feature 1..1470: note = source = /note="Description of Artificial Sequence: Synthetic polynucleotide"
  source 1..1470: mol_type = other DNA
atggccctccctgtcaccgccctgctgcttccgctggctcttctgctccacgccgctcggcccgaagtccaactggtggagtccgggggagggctcgtgcagcccggaggcagccttcggctgtcgtgcgccgcctccgggttcacgttctcatcctacgcgatgtcgtgggtcagacaggcaccaggaaagggactggaatgggtgtccgccattagcggctccggcggtagcacctactatgccgactcagtgaagggaaggttcactatctcccgcgacaacagcaagaacaccctgtacctccaaatgaactctctgcgggccgaggataccgcggtgtactattgcgccaagatgggttggtccagcggatacttgggagccttcgacatttggggacagggcactactgtgaccgtgtcctccgggggtggcggatcgggaggcggcggctcgggtggagggggttccgaaatcgtgttgacccagtcaccgggaaccctctcgctgtccccgggagaacgggctacactgtcatgtagagcgtcccagtccgtggcttcctcgttcctggcctggtaccagcagaagccgggacaggcaccccgcctgctcatctacggagccagcggccgggcgaccggcatccctgaccgcttctccggttccggctcgggcaccgactttactctgaccattagcaggcttgagcccgaggattttgccgtgtactactgccaacactacggggggagccctcgcctgaccttcggaggcggaactaaggtcgatatcaaaaccactaccccagcaccgaggccacccaccccggctcctaccatcgcctcccagcctctgtccctgcgtccggaggcatgtagacccgcagctggtggggccgtgcatacccggggtcttgacttcgcctgcgatatctacatttgggcccctctggctggtacttgcggggtcctgctgctttcactcgtgatcactctttactgtaagcgcggtcggaagaagctgctgtacatctttaagcaacccttcatgaggcctgtgcagactactcaagaggaggacggctgttcatgccggttcccagaggaggaggaaggcggctgcgaactgcgcgtgaaattcagccgcagcgcagatgctccagcctacaagcaggggcagaaccagctctacaacgaactcaatcttggtcggagagaggagtacgacgtgctggacaagcggagaggacgggacccagaaatgggcgggaagccgcgcagaaagaatccccaagagggcctgtacaacgagctccaaaaggataagatggcagaagcctatagcgagattggtatgaaaggggaacgcagaagaggcaaaggccacgacggactgtaccagggactcagcaccgccaccaaggacacctatgacgctcttcacatgcaggccctgccgcctcgg

SEQ ID NO: 1183 - protein, 122 aa, synthetic construct
  REGION 1..122: note = source = /note="Description of Artificial Sequence: Synthetic polypeptide"
QIQLVQSGPDLKKPGETVKLSCKASGYTFTNFGMNWVKQAPGKGFKWMAWINTYTGESYFADDFKGRFAFSVETSATTAYLQINNLKTEDTATYFCARGEIYYGYDGGFAYWGQGTLVTVSA

SEQ ID NO: 1184 - protein, 107 aa, synthetic construct
  REGION 1..107: note = source = /note="Description of Artificial Sequence: Synthetic polypeptide"
DVVMTQSHRFMSTSVGDRVSITCRASQDVNTAVSWYQQKPGQSPKLLIFSASYRYTGVPDRFTGSGSGADFTLTISSVQAEDLAVYYCQQHYSTPWTFGGGTKLDIK

SEQ ID NO: 1185 - protein, 244 aa, synthetic construct
  REGION 1..244: note = source = /note="Description of Artificial Sequence: Synthetic polypeptide"
QIQLVQSGPDLKKPGETVKLSCKASGYTFTNFGMNWVKQAPGKGFKWMAWINTYTGESYFADDFKGRFAFSVETSATTAYLQINNLKTEDTATYFCARGEIYYGYDGGFAYWGQGTLVTVSAGGGGSGGGGSGGGGSDVVMTQSHRFMSTSVGDRVSITCRASQDVNTAVSWYQQKPGQSPKLLIFSASYRYTGVPDRFTGSGSGADFTLTISSVQAEDLAVYYCQQHYSTPWTFGGGTKLDIK

SEQ ID NO: 1186 - protein, 467 aa, synthetic construct
  REGION 1..467: note = source = /note="Description of Artificial Sequence: Synthetic polypeptide"
QIQLVQSGPDLKKPGETVKLSCKASGYTFTNFGMNWVKQAPGKGFKWMAWINTYTGESYFADDFKGRFAFSVETSATTAYLQINNLKTEDTATYFCARGEIYYGYDGGFAYWGQGTLVTVSAGGGGSGGGGSGGGGSDVVMTQSHRFMSTSVGDRVSITCRASQDVNTAVSWYQQKPGQSPKLLIFSASYRYTGVPDRFTGSGSGADFTLTISSVQAEDLAVYYCQQHYSTPWTFGGGTKLDIKTTTPAPRPPTPAPTIASQPLSLRPEACRPAAGGAVHTRGLDFACDIYIWAPLAGTCGVLLLSLVITLYCKRGRKKLLYIFKQPFMRPVQTTQEEDGCSCRFPEEEEGGCELRVKFSRSADAPAYKQGQNQLYNELNLGRREEYDVLDKRRGRDPEMGGKPRRKNPQEGLYNELQKDKMAEAYSEIGMKGERRRGKGHDGLYQGLSTATKDTYDALHMQALPPR

SEQ ID NO: 1187 - protein, 117 aa, synthetic construct
  REGION 1..117: note = source = /note="Description of Artificial Sequence: Synthetic polypeptide"
QIQLVQSGPELKKPGETVKISCKASGYTFTDYSINWVKRAPGKGLKWMGWINTETREPAYAYDFRGRFAFSLETSASTAYLQINNLKYEDTATYFCALDYSYAMDYWGQGTSVTVSS

SEQ ID NO: 1188 - protein, 111 aa, synthetic construct
  REGION 1..111: note = source = /note="Description of Artificial Sequence: Synthetic polypeptide"
DIVLTQSPASLAMSLGKRATISCRASESVSVIGAHLIHWYQQKPGQPPKLLIYLASNLETGVPARFSGSGSGTDFTLTIDPVEEDDVAIYSCLQSRIFPRTFGGGTKLEIK

SEQ ID NO: 1189 - protein, 249 aa, synthetic construct
  REGION 1..249: note = source = /note="Description of Artificial Sequence: Synthetic polypeptide"
QIQLVQSGPELKKPGETVKISCKASGYTFTDYSINWVKRAPGKGLKWMGWINTETREPAYAYDFRGRFAFSLETSASTAYLQINNLKYEDTATYFCALDYSYAMDYWGQGTSVTVSSGGGGSGGGGSGGGGSQIQLVQSGPELKKPGETVKISCKASGYTFTDYSINWVKRAPGKGLKWMGWINTETREPAYAYDFRGRFAFSLETSASTAYLQINNLKYEDTATYFCALDYSYAMDYWGQGTSVTVSS

SEQ ID NO: 1190 - protein, 472 aa, synthetic construct
  REGION 1..472: note = source = /note="Description of Artificial Sequence: Synthetic polypeptide"
QIQLVQSGPELKKPGETVKISCKASGYTFTDYSINWVKRAPGKGLKWMGWINTETREPAYAYDFRGRFAFSLETSASTAYLQINNLKYEDTATYFCALDYSYAMDYWGQGTSVTVSSGGGGSGGGGSGGGGSQIQLVQSGPELKKPGETVKISCKASGYTFTDYSINWVKRAPGKGLKWMGWINTETREPAYAYDFRGRFAFSLETSASTAYLQINNLKYEDTATYFCALDYSYAMDYWGQGTSVTVSSTTTPAPRPPTPAPTIASQPLSLRPEACRPAAGGAVHTRGLDFACDIYIWAPLAGTCGVLLLSLVITLYCKRGRKKLLYIFKQPFMRPVQTTQEEDGCSCRFPEEEEGGCELRVKFSRSADAPAYKQGQNQLYNELNLGRREEYDVLDKRRGRDPEMGGKPRRKNPQEGLYNELQKDKMAEAYSEIGMKGERRRGKGHDGLYQGLSTATKDTYDALHMQALPPR

SEQ ID NO: 1191 - protein, 117 aa, synthetic construct
  REGION 1..117: note = source = /note="Description of Artificial Sequence: Synthetic polypeptide"
QIQLVQSGPELKKPGETVKISCKASGYTFRHYSMNWVKQAPGKGLKWMGRINTESGVPIYADDFKGRFAFSVETSASTAYLVINNLKDEDTASYFCSNDYLYSLDFWGQGTALTVSS

SEQ ID NO: 1192 - protein, 111 aa, synthetic construct
  REGION 1..111: note = source = /note="Description of Artificial Sequence: Synthetic polypeptide"
DIVLTQSPPSLAMSLGKRATISCRASESVTILGSHLIYWYQQKPGQPPTLLIQLASNVQTGVPARFSGSGSRTDFTLTIDPVEEDDVAVYYCLQSRTIPRTFGGGTKLEIK

SEQ ID NO: 1193 - protein, 243 aa, synthetic construct
  REGION 1..243: note = source = /note="Description of Artificial Sequence: Synthetic polypeptide"
QIQLVQSGPELKKPGETVKISCKASGYTFRHYSMNWVKQAPGKGLKWMGRINTESGVPIYADDFKGRFAFSVETSASTAYLVINNLKDEDTASYFCSNDYLYSLDFWGQGTALTVSSGGGGSGGGGSGGGGSDIVLTQSPPSLAMSLGKRATISCRASESVTILGSHLIYWYQQKPGQPPTLLIQLASNVQTGVPARFSGSGSRTDFTLTIDPVEEDDVAVYYCLQSRTIPRTFGGGTKLEIK

SEQ ID NO: 1194 - protein, 466 aa, synthetic construct
  REGION 1..466: note = source = /note="Description of Artificial Sequence: Synthetic polypeptide"
QIQLVQSGPELKKPGETVKISCKASGYTFRHYSMNWVKQAPGKGLKWMGRINTESGVPIYADDFKGRFAFSVETSASTAYLVINNLKDEDTASYFCSNDYLYSLDFWGQGTALTVSSGGGGSGGGGSGGGGSDIVLTQSPPSLAMSLGKRATISCRASESVTILGSHLIYWYQQKPGQPPTLLIQLASNVQTGVPARFSGSGSRTDFTLTIDPVEEDDVAVYYCLQSRTIPRTFGGGTKLEIKTTTPAPRPPTPAPTIASQPLSLRPEACRPAAGGAVHTRGLDFACDIYIWAPLAGTCGVLLLSLVITLYCKRGRKKLLYIFKQPFMRPVQTTQEEDGCSCRFPEEEEGGCELRVKFSRSADAPAYKQGQNQLYNELNLGRREEYDVLDKRRGRDPEMGGKPRRKNPQEGLYNELQKDKMAEAYSEIGMKGERRRGKGHDGLYQGLSTATKDTYDALHMQALPPR

SEQ ID NO: 1195 - protein, 117 aa, synthetic construct
  REGION 1..117: note = source = /note="Description of Artificial Sequence: Synthetic polypeptide"
QIQLVQSGPELKKPGETVKISCKASGYTFTHYSMNWVKQAPGKGLKWMGRINTETGEPLYADDFKGRFAFSLETSASTAYLVINNLKNEDTATFFCSNDYLYSCDYWGQGTTLTVSS

SEQ ID NO: 1196 - protein, 111 aa, synthetic construct; identical to SEQ ID NO: 1192
  REGION 1..111: note = source = /note="Description of Artificial Sequence: Synthetic polypeptide"

SEQ ID NO: 1197 - protein, 243 aa, synthetic construct
  REGION 1..243: note = source = /note="Description of Artificial Sequence: Synthetic polypeptide"
QIQLVQSGPELKKPGETVKISCKASGYTFTHYSMNWVKQAPGKGLKWMGRINTETGEPLYADDFKGRFAFSLETSASTAYLVINNLKNEDTATFFCSNDYLYSCDYWGQGTTLTVSSGGGGSGGGGSGGGGSDIVLTQSPPSLAMSLGKRATISCRASESVTILGSHLIYWYQQKPGQPPTLLIQLASNVQTGVPARFSGSGSRTDFTLTIDPVEEDDVAVYYCLQSRTIPRTFGGGTKLEIK

SEQ ID NO: 1198 - protein, 466 aa, synthetic construct
  REGION 1..466: note = source = /note="Description of Artificial Sequence: Synthetic polypeptide"
QIQLVQSGPELKKPGETVKISCKASGYTFTHYSMNWVKQAPGKGLKWMGRINTETGEPLYADDFKGRFAFSLETSASTAYLVINNLKNEDTATFFCSNDYLYSCDYWGQGTTLTVSSGGGGSGGGGSGGGGSDIVLTQSPPSLAMSLGKRATISCRASESVTILGSHLIYWYQQKPGQPPTLLIQLASNVQTGVPARFSGSGSRTDFTLTIDPVEEDDVAVYYCLQSRTIPRTFGGGTKLEIKTTTPAPRPPTPAPTIASQPLSLRPEACRPAAGGAVHTRGLDFACDIYIWAPLAGTCGVLLLSLVITLYCKRGRKKLLYIFKQPFMRPVQTTQEEDGCSCRFPEEEEGGCELRVKFSRSADAPAYKQGQNQLYNELNLGRREEYDVLDKRRGRDPEMGGKPRRKNPQEGLYNELQKDKMAEAYSEIGMKGERRRGKGHDGLYQGLSTATKDTYDALHMQALPPR

SEQ ID NO: 1199 - protein, 5 aa, synthetic construct
  REGION 1..5: note = source = /note="Description of Artificial Sequence: Synthetic peptide"
NHGMS

SEQ ID NO: 1200 - protein, 5 aa, synthetic construct
  REGION 1..5: note = source = /note="Description of Artificial Sequence: Synthetic peptide"
NYAMS

SEQ ID NO: 1201 - protein, 5 aa, synthetic construct
  REGION 1..5: note = source = /note="Description of Artificial Sequence: Synthetic peptide"
DYAMH

SEQ ID NO: 1202 - protein, 5 aa, synthetic construct
  REGION 1..5: note = source = /note="Description of Artificial Sequence: Synthetic peptide"
NHGMS

SEQ ID NO: 1203 - protein, 5 aa, synthetic construct
  REGION 1..5: note = source = /note="Description of Artificial Sequence: Synthetic peptide"
NFGIN

SEQ ID NO: 1204 - protein, 5 aa, synthetic construct
  REGION 1..5: note = source = /note="Description of Artificial Sequence: Synthetic peptide"
SDAMT

SEQ ID NO: 1205 - protein, 5 aa, synthetic construct
  REGION 1..5: note = source = /note="Description of Artificial Sequence: Synthetic peptide"
NYGIT

SEQ ID NO: 1206 - protein, 5 aa, synthetic construct
  REGION 1..5: note = source = /note="Description of Artificial Sequence: Synthetic peptide"
NHGMS

SEQ ID NO: 1207 - protein, 5 aa, synthetic construct
  REGION 1..5: note = source = /note="Description of Artificial Sequence: Synthetic peptide"
NHGMS

SEQ ID NO: 1208 - protein, 5 aa, synthetic construct
  REGION 1..5: note = source = /note="Description of Artificial Sequence: Synthetic peptide"
NHGMS

SEQ ID NO: 1209 - protein, 5 aa, synthetic construct
  REGION 1..5: note = source = /note="Description of Artificial Sequence: Synthetic peptide"
DYYMS

SEQ ID NO: 1210 - protein, 5 aa, synthetic construct
  REGION 1..5: note = source = /note="Description of Artificial Sequence: Synthetic peptide"
DYYMS

SEQ ID NO: 1211 - protein, 5 aa, synthetic construct
  REGION 1..5: note = source = /note="Description of Artificial Sequence: Synthetic peptide"
NHGMS

SEQ ID NO: 1212 - protein, 5 aa, synthetic construct
  REGION 1..5: note = source = /note="Description of Artificial Sequence: Synthetic peptide"
NHGMS

SEQ ID NO: 1213 - protein, 5 aa, synthetic construct
  REGION 1..5: note = source = /note="Description of Artificial Sequence: Synthetic peptide"
NHGMS

SEQ ID NO: 1214 - protein, 7 aa, synthetic construct
  REGION 1..7: note = source = /note="Description of Artificial Sequence: Synthetic peptide"
SSYYYWG

SEQ ID NO: 1215 - protein, 7 aa, synthetic construct
  REGION 1..7: note = source = /note="Description of Artificial Sequence: Synthetic peptide"
TSGMCVS

SEQ ID NO: 1216 - protein, 5 aa, synthetic construct
  REGION 1..5: note = source = /note="Description of Artificial Sequence: Synthetic peptide"
SYSMN

SEQ ID NO: 1217 - protein, 5 aa, synthetic construct
  REGION 1..5: note = source = /note="Description of Artificial Sequence: Synthetic peptide"
DYYMS

SEQ ID NO: 1218 - protein, 5 aa, synthetic construct
  REGION 1..5: note = source = /note="Description of Artificial Sequence: Synthetic peptide"
SHYIH

SEQ ID NO: 1219 - protein, 7 aa, synthetic construct
  REGION 1..7: note = source = /note="Description of Artificial Sequence: Synthetic peptide"
SGGYYWS

SEQ ID NO: 1220 - protein, 5 aa, synthetic construct
  REGION 1..5: note = source = /note="Description of Artificial Sequence: Synthetic peptide"
SYAIS

SEQ ID NO: 1221 - protein, 7 aa, synthetic construct
  REGION 1..7: note = source = /note="Description of Artificial Sequence: Synthetic peptide"
SNSAAWN

SEQ ID NO: 1222 - protein, 5 aa, synthetic construct
  REGION 1..5: note = source = /note="Description of Artificial Sequence: Synthetic peptide"
SYAMS

SEQ ID NO: 1223 - protein, 5 aa, synthetic construct
  REGION 1..5: note = source = /note="Description of Artificial Sequence: Synthetic peptide"
RYPMS

SEQ ID NO: 1224 - protein, 5 aa, synthetic construct
  REGION 1..5: note = source = /note="Description of Artificial Sequence: Synthetic peptide"
SYAMS

SEQ ID NO: 1225 - protein, 5 aa, synthetic construct
  REGION 1..5: note = source = /note="Description of Artificial Sequence: Synthetic peptide"
SYAMS

SEQ ID NO: 1226 - protein, 5 aa, synthetic construct
  REGION 1..5: note = source = /note="Description of Artificial Sequence: Synthetic peptide"
DYAMH

SEQ ID NO: 1227 - protein, 5 aa, synthetic construct
  REGION 1..5: note = source = /note="Description of Artificial Sequence: Synthetic peptide"
DYAMH

SEQ ID NO: 1228 - protein, 5 aa, synthetic construct
  REGION 1..5: note = source = /note="Description of Artificial Sequence: Synthetic peptide"
SYAMS

SEQ ID NO: 1229 - protein, 5 aa, synthetic construct
  REGION 1..5: note = source = /note="Description of Artificial Sequence: Synthetic peptide"
SYAMS

SEQ ID NO: 1230 - protein, 5 aa, synthetic construct
  REGION 1..5: note = source = /note="Description of Artificial Sequence: Synthetic peptide"
SYAMS

SEQ ID NO: 1231 - protein, 5 aa, synthetic construct
  REGION 1..5: note = source = /note="Description of Artificial Sequence: Synthetic peptide"
SYAMS

SEQ ID NO: 1232 - protein, 5 aa, synthetic construct
  REGION 1..5: note = source = /note="Description of Artificial Sequence: Synthetic peptide"
SYAMS

SEQ ID NO: 1233 - protein, 5 aa, synthetic construct
  REGION 1..5: note = source = /note="Description of Artificial Sequence: Synthetic peptide"
SYAMS

SEQ ID NO: 1234 - protein, 5 aa, synthetic construct
  REGION 1..5: note = source = /note="Description of Artificial Sequence: Synthetic peptide"
SYAMS

SEQ ID NO: 1235 - protein, 5 aa, synthetic construct
  REGION 1..5: note = source = /note="Description of Artificial Sequence: Synthetic peptide"
NFGMN

SEQ ID NO: 1236 - protein, 5 aa, synthetic construct
  REGION 1..5: note = source = /note="Description of Artificial Sequence: Synthetic peptide"
DYSIN

SEQ ID NO: 1237 - protein, 5 aa, synthetic construct
  REGION 1..5: note = source = /note="Description of Artificial Sequence: Synthetic peptide"
HYSMN

SEQ ID NO: 1238 - protein, 5 aa, synthetic construct
  REGION 1..5: note = source = /note="Description of Artificial Sequence: Synthetic peptide"
HYSMN

SEQ ID NO: 1239 - protein, 16 aa, synthetic construct
  REGION 1..16: note = source = /note="Description of Artificial Sequence: Synthetic peptide"
GIVYSGSTYYAASVKG

SEQ ID NO: 1240 - protein, 17 aa, synthetic construct
  REGION 1..17: note = source = /note="Description of Artificial Sequence: Synthetic peptide"
GISRSGENTYYADSVKG

SEQ ID NO: 1241 - protein, 17 aa, synthetic construct
  REGION 1..17: note = source = /note="Description of Artificial Sequence: Synthetic peptide"
GISWNSGSIGYADSVKG

SEQ ID NO: 1242 - protein, 16 aa, synthetic construct
  REGION 1..16: note = source = /note="Description of Artificial Sequence: Synthetic peptide"
GIVYSGSTYYAASVKG

SEQ ID NO: 1243 - protein, 17 aa, synthetic construct
  REGION 1..17: note = source = /note="Description of Artificial Sequence: Synthetic peptide"
WINPKNNNTNYAQKFQG

SEQ ID NO: 1244 - protein, 17 aa, synthetic construct
  REGION 1..17: note = source = /note="Description of Artificial Sequence: Synthetic peptide"
VISGSGGTTYYADSVKG

SEQ ID NO: 1245 - protein, 17 aa, synthetic construct
  REGION 1..17: note = source = /note="Description of Artificial Sequence: Synthetic peptide"
WISAYNGNTNYAQKFQG

SEQ ID NO: 1246 - protein, 16 aa, synthetic construct
  REGION 1..16: note = source = /note="Description of Artificial Sequence: Synthetic peptide"
GIVYSGSTYYAASVKG

SEQ ID NO: 1247 - protein, 16 aa, synthetic construct
  REGION 1..16: note = source = /note="Description of Artificial Sequence: Synthetic peptide"
GIVYSGSTYYAASVKG

SEQ ID NO: 1248 - protein, 16 aa, synthetic construct
  REGION 1..16: note = source = /note="Description of Artificial Sequence: Synthetic peptide"
GIVYSGSTYYAASVKG

SEQ ID NO: 1249 - protein, 17 aa, synthetic construct
  REGION 1..17: note = source = /note="Description of Artificial Sequence: Synthetic peptide"
YISSSGSTIYYADSVKG

SEQ ID NO: 1250 - protein, 17 aa, synthetic construct
  REGION 1..17: note = source = /note="Description of Artificial Sequence: Synthetic peptide"
YISSSGNTIYYADSVKG

SEQ ID NO: 1251 - protein, 16 aa, synthetic construct
  REGION 1..16: note = source = /note="Description of Artificial Sequence: Synthetic peptide"
GIVYSGSTYYAASVKG

SEQ ID NO: 1252 - protein, 16 aa, synthetic construct
  REGION 1..16: note = source = /note="Description of Artificial Sequence: Synthetic peptide"
GIVYSGSTYYAASVKG

SEQ ID NO: 1253 - protein, 16 aa, synthetic construct
  REGION 1..16: note = source = /note="Description of Artificial Sequence: Synthetic peptide"
GIVYSGSTYYAASVKG

SEQ ID NO: 1254 - protein, 16 aa, synthetic construct
  REGION 1..16: note = source = /note="Description of Artificial Sequence: Synthetic peptide"
SIYYSGSAYYNPSLKS

SEQ ID NO: 1255 - protein, 16 aa, synthetic construct
  REGION 1..16: note = source = /note="Description of Artificial Sequence: Synthetic peptide"
RIDWDEDKFYSTSLKT

SEQ ID NO: 1256 - protein, 17 aa, synthetic construct
  REGION 1..17: note = source = /note="Description of Artificial Sequence: Synthetic peptide"
SISSSSSYIYYADSVKG

SEQ ID NO: 1257 - protein, 17 aa, synthetic construct
  REGION 1..17: note = source = /note="Description of Artificial Sequence: Synthetic peptide"
YISSSGSTIYYADSVKG

SEQ ID NO: 1258 - protein, 17 aa, synthetic construct
  REGION 1..17: note = source = /note="Description of Artificial Sequence: Synthetic peptide"
MINPSGGVTAYSQTLQG

SEQ ID NO: 1259 - protein, 16 aa, synthetic construct
  REGION 1..16: note = source = /note="Description of Artificial Sequence: Synthetic peptide"
YIYYSGSTYYNPSLKS

SEQ ID NO: 1260 - protein, 17 aa, synthetic construct
  REGION 1..17: note = source = /note="Description of Artificial Sequence: Synthetic peptide"
GIIPIFGTANYAQKFQG

SEQ ID NO: 1261 - protein, 18 aa, synthetic construct
  REGION 1..18: note = source = /note="Description of Artificial Sequence: Synthetic peptide"
RTYYRSKWYSFYAISLKS

SEQ ID NO: 1262 - protein, 17 aa, synthetic construct
  REGION 1..17: note = source = /note="Description of Artificial Sequence: Synthetic peptide"
AISGSGGSTYYADSVKG

SEQ ID NO: 1263 - protein, 17 aa, synthetic construct
  REGION 1..17: note = source = /note="Description of Artificial Sequence: Synthetic peptide"
GISDSGVSTYYADSAKG

SEQ ID NO: 1264 - protein, 17 aa, synthetic construct
  REGION 1..17: note = source = /note="Description of Artificial Sequence: Synthetic peptide"
AISGSGGSTYYADSVKG

SEQ ID NO: 1265 - protein, 17 aa, synthetic construct
  REGION 1..17: note = source = /note="Description of Artificial Sequence: Synthetic peptide"
AISGSGGSTYYADSVKG

SEQ ID NO: 1266 - protein, 17 aa, synthetic construct
  REGION 1..17: note = source = /note="Description of Artificial Sequence: Synthetic peptide"
GISWNSGSIGYADSVKG

SEQ ID NO: 1267 - protein, 17 aa, synthetic construct
  REGION 1..17: note = source = /note="Description of Artificial Sequence: Synthetic peptide"
SINWKGNSLAYGDSVKG

SEQ ID NO: 1268 - protein, 17 aa, synthetic construct
  REGION 1..17: note = source = /note="Description of Artificial Sequence: Synthetic peptide"
AISGSGGSTYYADSVKG

SEQ ID NO: 1269 - protein, 17 aa, synthetic construct
  REGION 1..17: note = source = /note="Description of Artificial Sequence: Synthetic peptide"
AISGSGGSTYYADSVKG

SEQ ID NO: 1270 - protein, 17 aa, synthetic construct
  REGION 1..17: note = source = /note="Description of Artificial Sequence: Synthetic peptide"
AISGSGGSTYYADSVKG

SEQ ID NO: 1271 - protein, 17 aa, synthetic construct
  REGION 1..17: note = source = /note="Description of Artificial Sequence: Synthetic peptide"
AISGSGGSTYYADSVKG

SEQ ID NO: 1272 - protein, 17 aa, synthetic construct
  REGION 1..17: note = source = /note="Description of Artificial Sequence: Synthetic peptide"
AISGSGGSTYYADSVKG

SEQ ID NO: 1273 - protein, 17 aa, synthetic construct
  REGION 1..17: note = source = /note="Description of Artificial Sequence: Synthetic peptide"
AISGSGGSTYYADSVKG

SEQ ID NO: 1274 - protein, 17 aa, synthetic construct
  REGION 1..17: note = source = /note="Description of Artificial Sequence: Synthetic peptide"
AISGSGGSTYYADSVKG

SEQ ID NO: 1275 - protein, 17 aa, synthetic construct
  REGION 1..17: note = source = /note="Description of Artificial Sequence: Synthetic peptide"
WINTYTGESYFADDFKG

SEQ ID NO: 1276 - protein, 17 aa, synthetic construct
  REGION 1..17: note = source = /note="Description of Artificial Sequence: Synthetic peptide"
WINTETREPAYAYDFRG

SEQ ID NO: 1277 - protein, 17 aa, synthetic construct
  REGION 1..17: note = source = /note="Description of Artificial Sequence: Synthetic peptide"
RINTESGVPIYADDFKG

SEQ ID NO: 1278 - protein, 17 aa, synthetic construct
  REGION 1..17: note = source = /note="Description of Artificial Sequence: Synthetic peptide"
RINTETGEPLYADDFKG

SEQ ID NO: 1279 - protein, 7 aa, synthetic construct
  REGION 1..7: note = source = /note="Description of Artificial Sequence: Synthetic peptide"
HGGESDV

SEQ ID NO: 1280 - protein, 11 aa, synthetic construct
  REGION 1..11: note = source = /note="Description of Artificial Sequence: Synthetic peptide"
SPAHYYGGMDV

SEQ ID NO: 1281 - protein, 6 aa, synthetic construct
  REGION 1..6: note = source = /note="Description of Artificial Sequence: Synthetic peptide"
HSFLAY

SEQ ID NO: 1282 - protein, 7 aa, synthetic construct
  REGION 1..7: note = source = /note="Description of Artificial Sequence: Synthetic peptide"
HGGESDV

SEQ ID NO: 1283 - protein, 11 aa, synthetic construct
  REGION 1..11: note = source = /note="Description of Artificial Sequence: Synthetic peptide"
GPYYYQSYMDV

SEQ ID NO: 1284 - protein, 14 aa, synthetic construct
  REGION 1..14: note = source = /note="Description of Artificial Sequence: Synthetic peptide"
LDSSGYYYARGPRY

SEQ ID NO: 1285 - protein, 9 aa, synthetic construct
  REGION 1..9: note = source = /note="Description of Artificial Sequence: Synthetic peptide"
GPYYYYMDV

SEQ ID NO: 1286 - protein, 7 aa, synthetic construct
  REGION 1..7: note = source = /note="Description of Artificial Sequence: Synthetic peptide"
HGGESDV

SEQ ID NO: 1287 - protein, 7 aa, synthetic construct
  REGION 1..7: note = source = /note="Description of Artificial Sequence: Synthetic peptide"
HGGESDV

SEQ ID NO: 1288 - protein, 7 aa, synthetic construct
  REGION 1..7: note = source = /note="Description of Artificial Sequence: Synthetic peptide"
HGGESDV

SEQ ID NO: 1289 - protein, 8 aa, synthetic construct
  REGION 1..8: note = source = /note="Description of Artificial Sequence: Synthetic peptide"
ESGDGMDV

SEQ ID NO: 1290 - protein, 8 aa, synthetic construct
  REGION 1..8: note = source = /note="Description of Artificial Sequence: Synthetic peptide"
STMVREDY

SEQ ID NO: 1291 - protein, 7 aa, synthetic construct
  REGION 1..7: note = source = /note="Description of Artificial Sequence: Synthetic peptide"
HGGESDV

SEQ ID NO: 1292 - protein, 7 aa, synthetic construct
  REGION 1..7: note = source = /note="Description of Artificial Sequence: Synthetic peptide"
HGGESDV

SEQ ID NO: 1293 - protein, 7 aa, synthetic construct
  REGION 1..7: note = source = /note="Description of Artificial Sequence: Synthetic peptide"
HGGESDV

SEQ ID NO: 1294 - protein, 11 aa, synthetic construct
  REGION 1..11: note = source = /note="Description of Artificial Sequence: Synthetic peptide"
HWQEWPDAFDI

SEQ ID NO: 1295 - protein, 13 aa, synthetic construct
  REGION 1..13: note = source = /note="Description of Artificial Sequence: Synthetic peptide"
SGAGGTSATAFDI

SEQ ID NO: 1296 - protein, 10 aa, synthetic construct
  REGION 1..10: note = source = /note="Description of Artificial Sequence: Synthetic peptide"
TIAAVYAFDI

SEQ ID NO: 1297 - protein, 8 aa, synthetic construct
  REGION 1..8: note = source = /note="Description of Artificial Sequence: Synthetic peptide"
DLRGAFDI

SEQ ID NO: 1298 - protein, 11 aa, synthetic construct
  REGION 1..11: note = source = /note="Description of Artificial Sequence: Synthetic peptide"
EGSGSGWYFDF

SEQ ID NO: 1299 - protein, 13 aa, synthetic construct
  REGION 1..13: note = source = /note="Description of Artificial Sequence: Synthetic peptide"
AGIAARLRGAFDI

SEQ ID NO: 1300 - protein, 20 aa, synthetic construct
  REGION 1..20: note = source = /note="Description of Artificial Sequence: Synthetic peptide"
RGGYQLLRWDVGLLRSAFDI

SEQ ID NO: 1301 - protein, 13 aa, synthetic construct
  REGION 1..13: note = source = /note="Description of Artificial Sequence: Synthetic peptide"
SSPEGLFLYWFDP

SEQ ID NO: 1302 - protein, 9 aa, synthetic construct
  REGION 1..9: note = source = /note="Description of Artificial Sequence: Synthetic peptide"
VEGSGSLDY

SEQ ID NO: 1303 - protein, 9 aa, synthetic construct
  REGION 1..9: note = source = /note="Description of Artificial Sequence: Synthetic peptide"
RAGSEASDI

SEQ ID NO: 1304 - protein, 15 aa, synthetic construct
  REGION 1..15: note = source = /note="Description of Artificial Sequence: Synthetic peptide"
ATYKRELRYYYGMDV

SEQ ID NO: 1305 - protein, 15 aa, synthetic construct
  REGION 1..15: note = source = /note="Description of Artificial Sequence: Synthetic peptide"
ATYKRELRYYYGMDV

SEQ ID NO: 1306 - protein, 8 aa, synthetic construct
  REGION 1..8: note = source = /note="Description of Artificial Sequence: Synthetic peptide"
VGKAVPDV

SEQ ID NO: 1307 - protein, 13 aa, synthetic construct
  REGION 1..13: note = source = /note="Description of Artificial Sequence: Synthetic peptide"
HQGVAYYNYAMDV

SEQ ID NO: 1308 - protein, 8 aa, synthetic construct
  REGION 1..8: note = source = /note="Description of Artificial Sequence: Synthetic peptide"
VVRDGMDV

SEQ ID NO: 1309 - protein, 9 aa, synthetic construct
  REGION 1..9: note = source = /note="Description of Artificial Sequence: Synthetic peptide"
IPQTGTFDY

SEQ ID NO: 1310 - protein, 15 aa, synthetic construct
  REGION 1..15: note = source = /note="Description of Artificial Sequence: Synthetic peptide"
ANYKRELRYYYGMDV

SEQ ID NO: 1311 - protein, 11 aa, synthetic construct
  REGION 1..11: note = source = /note="Description of Artificial Sequence: Synthetic peptide"
ALVGATGAFDI

SEQ ID NO: 1312 - protein, 8 aa, synthetic construct
  REGION 1..8: note = source = /note="Description of Artificial Sequence: Synthetic peptide"
WFGEGFDP

SEQ ID NO: 1313 - protein, 17 aa, synthetic construct
  REGION 1..17: note = source = /note="Description of Artificial Sequence: Synthetic peptide"
VGYDSSGYYRDYYGMDV

SEQ ID NO: 1314 - protein, 13 aa, synthetic construct
  REGION 1..13: note = source = /note="Description of Artificial Sequence: Synthetic peptide"
MGWSSGYLGAFDI

SEQ ID NO: 1315 - protein, 13 aa, synthetic construct
  REGION 1..13: note = source = /note="Description of Artificial Sequence: Synthetic peptide"
GEIYYGYDGGFAY

SEQ ID NO: 1316 - protein, 8 aa, synthetic construct
  REGION 1..8: note = source = /note="Description of Artificial Sequence: Synthetic peptide"
DYSYAMDY

SEQ ID NO: 1317 - protein, 8 aa, synthetic construct
  REGION 1..8: note = source = /note="Description of Artificial Sequence: Synthetic peptide"
DYLYSLDF

SEQ ID NO: 1318 - protein, 8 aa, synthetic construct
  REGION 1..8: note = source = /note="Description of Artificial Sequence: Synthetic peptide"
DYLYSCDY

SEQ ID NO: 1319 - protein, 11 aa, synthetic construct
  REGION 1..11: note = source = /note="Description of Artificial Sequence: Synthetic peptide"
RASQSISSYLN

SEQ ID NO: 1320 - protein, 12 aa, synthetic construct
  REGION 1..12: note = source = /note="Description of Artificial Sequence: Synthetic peptide"
RASQSISSSFLA

SEQ ID NO: 1321 - protein, 16 aa, synthetic construct
  REGION 1..16: note = source = /note="Description of Artificial Sequence: Synthetic peptide"
RSSQSLLHSNGYNYLD

SEQ ID NO: 1322 - protein, 16 aa, synthetic construct
  REGION 1..16: note = source = /note="Description of Artificial Sequence: Synthetic peptide"
KSSQSLLRNDGKTPLY

SEQ ID NO: 1323 - protein, 16 aa, synthetic construct
  REGION 1..16: note = source = /note="Description of Artificial Sequence: Synthetic peptide"
RSSQSLLHSNGYNYLN

SEQ ID NO: 1324 - protein, 11 aa, synthetic construct
  REGION 1..11: note = source = /note="Description of Artificial Sequence: Synthetic peptide"
RASQSISSYLN

SEQ ID NO: 1325 - protein, 16 aa, synthetic construct
  REGION 1..16: note = source = /note="Description of Artificial Sequence: Synthetic peptide"
RSSQSLLYSNGYNYVD

SEQ ID NO: 1326 - protein, 11 aa, synthetic construct
  REGION 1..11: note = source = /note="Description of Artificial Sequence: Synthetic peptide"
RASQSVSSNLA

SEQ ID NO: 1327 - protein, 11 aa, synthetic construct
  REGION 1..11: note = source = /note="Description of Artificial Sequence: Synthetic peptide"
RASQSVSSKLA

SEQ ID NO: 1328 - protein, 12 aa, synthetic construct
  REGION 1..12: note = source = /note="Description of Artificial Sequence: Synthetic peptide"
RASQSVGSTNLA

SEQ ID NO: 1329 - protein, 11 aa, synthetic construct
  REGION 1..11: note = source = /note="Description of Artificial Sequence: Synthetic peptide"
RASQSISSYLN

SEQ ID NO: 1330 - protein, 16 aa, synthetic construct
  REGION 1..16: note = source = /note="Description of Artificial Sequence: Synthetic peptide"
KSSESLVHNSGKTYLN

SEQ ID NO: 1331 - protein, 11 aa, synthetic construct
  REGION 1..11: note = source = /note="Description of Artificial Sequence: Synthetic peptide"
QASEDINKFLN

SEQ ID NO: 1332 - protein, 11 aa, synthetic construct
  REGION 1..11: note = source = /note="Description of Artificial Sequence: Synthetic peptide"
RASQSVGSNLA

SEQ ID NO: 1333 - protein, 12 aa, synthetic construct
  REGION 1..12: note = source = /note="Description of Artificial Sequence: Synthetic peptide"
RASQSIGSSSLA

SEQ ID NO: 1334 - protein, 11 aa, synthetic construct
  REGION 1..11: note = source = /note="Description of Artificial Sequence: Synthetic peptide"
KASQDIDDAMN

SEQ ID NO: 1335 - protein, 11 aa, synthetic construct
  REGION 1..11: note = source = /note="Description of Artificial Sequence: Synthetic peptide"
RASQDIYNNLA

SEQ ID NO: 1336 - protein, 16 aa, synthetic construct
  REGION 1..16: note = source = /note="Description of Artificial Sequence: Synthetic peptide"
RSSQSLLHSNGYNYLD

SEQ ID NO: 1337 - protein, 11 aa, synthetic construct
  REGION 1..11: note = source = /note="Description of Artificial Sequence: Synthetic peptide"
GGNNIGTKSVH

SEQ ID NO: 1338 - protein, 11 aa, synthetic construct
  REGION 1..11: note = source = /note="Description of Artificial Sequence: Synthetic peptide"
SGDGLSKKYVS

SEQ ID NO: 1339 - protein, 11 aa, synthetic construct
  REGION 1..11: note = source = /note="Description of Artificial Sequence: Synthetic peptide"
RASQGIRNWLA

SEQ ID NO: 1340 - protein, 11 aa, synthetic construct
  REGION 1..11: note = source = /note="Description of Artificial Sequence: Synthetic peptide"
GGNNIGSKSVH

SEQ ID NO: 1341 - protein, 11 aa, synthetic construct
  REGION 1..11: note = source = /note="Description of Artificial Sequence: Synthetic peptide"
QGDSLGNYYAT

SEQ ID NO: 1342 - protein, 12 aa, synthetic construct
  REGION 1..12: note = source = /note="Description of Artificial Sequence: Synthetic peptide"
RASQSVSSAYLA

SEQ ID NO: 1343 - protein, 11 aa, synthetic construct
  REGION 1..11: note = source = /note="Description of Artificial Sequence: Synthetic peptide"
RASQSVSNSLA

SEQ ID NO: 1344 - protein, 12 aa, synthetic construct
  REGION 1..12: note = source = /note="Description of Artificial Sequence: Synthetic peptide"
RASQSVSSSFLA

SEQ ID NO: 1345 - protein, 12 aa, synthetic construct
  REGION 1..12: note = source = /note="Description of Artificial Sequence: Synthetic peptide"
RASQSVSTTFLA

SEQ ID NO: 1346 - protein, 11 aa, synthetic construct
  REGION 1..11: note = source = /note="Description of Artificial Sequence: Synthetic peptide"
RASQSISSYLN

SEQ ID NO: 1347 - protein, 12 aa, synthetic construct
  REGION 1..12: note = source = /note="Description of Artificial Sequence: Synthetic peptide"
RATQSIGSSFLA

SEQ ID NO: 1348 - protein, 12 aa, synthetic construct
  REGION 1..12: note = source = /note="Description of Artificial Sequence: Synthetic peptide"
RASQSVSSSYLA

SEQ ID NO: 1349 - protein, 12 aa, synthetic construct
  REGION 1..12: note = source = /note="Description of Artificial Sequence: Synthetic peptide"
RASQSVSSSYLA

SEQ ID NO: 1350 - protein, 12 aa, synthetic construct
  REGION 1..12: note = source = /note="Description of Artificial Sequence: Synthetic peptide"
RASQRVASNYLA

SEQ ID NO: 1351 - protein, 12 aa, synthetic construct
  REGION 1..12: note = source = /note="Description of Artificial Sequence: Synthetic peptide"
RASQSLSSNFLA

SEQ ID NO: 1352 - protein, 16 aa, synthetic construct
  REGION 1..16: note = source = /note="Description of Artificial Sequence: Synthetic peptide"
RSSQSLLHSNGYNYLD

SEQ ID NO: 1353 - protein, 12 aa, synthetic construct
  REGION 1..12: note = source = /note="Description of Artificial Sequence: Synthetic peptide"
RASQSVSSSYLA

SEQ ID NO: 1354 - protein, 12 aa, synthetic construct
  REGION 1..12: note = source = /note="Description of Artificial Sequence: Synthetic peptide"
RASQSVASSFLA

SEQ ID NO: 1355 - protein, 11 aa, synthetic construct
  REGION 1..11: note = source = /note="Description of Artificial Sequence: Synthetic peptide"
RASQDVNTAVS

SEQ ID NO: 1356 - protein, 15 aa, synthetic construct
  REGION 1..15: note = source = /note="Description of Artificial Sequence: Synthetic peptide"
RASESVSVIGAHLIH

SEQ ID NO: 1357 - protein, 15 aa, synthetic construct
  REGION 1..15: note = source = /note="Description of Artificial Sequence: Synthetic peptide"
RASESVTILGSHLIY

SEQ ID NO: 1358 - protein, 15 aa, synthetic construct
  REGION 1..15: note = source = /note="Description of Artificial Sequence: Synthetic peptide"
RASESVTILGSHLIY

SEQ ID NO: 1359 - protein, 7 aa, synthetic construct
  REGION 1..7: note = source = /note="Description of Artificial Sequence: Synthetic peptide"
AASSLQS

SEQ ID NO: 1360 - protein, 7 aa, synthetic construct
  REGION 1..7: note = source = /note="Description of Artificial Sequence: Synthetic peptide"
GASRRAT

SEQ ID NO: 1361 - protein, 7 aa, synthetic construct
  REGION 1..7: note = source = /note="Description of Artificial Sequence: Synthetic peptide"
LGSNRAS

SEQ ID NO: 1362 - protein, 7 aa, synthetic construct
  REGION 1..7: note = source = /note="Description of Artificial Sequence: Synthetic peptide"
EVSNRFS

SEQ ID NO: 1363 - protein, 7 aa, synthetic construct
  REGION 1..7: note = source = /note="Description of Artificial Sequence: Synthetic peptide"
LGSKRAS

SEQ ID NO: 1364 - protein, 7 aa, synthetic construct
  REGION 1..7: note = source = /note="Description of Artificial Sequence: Synthetic peptide"
GASTLAS

SEQ ID NO: 1365 - protein, 7 aa, synthetic construct
  REGION 1..7: note = source = /note="Description of Artificial Sequence: Synthetic peptide"
LGSNRAS

SEQ ID NO: 1366 - protein, 7 aa, synthetic construct
  REGION 1..7: note = source = /note="Description of Artificial Sequence: Synthetic peptide"
GASTRAS

SEQ ID NO: 1367 - protein, 7 aa, synthetic construct
  REGION 1..7: note = source = /note="Description of Artificial Sequence: Synthetic peptide"
GASIRAT

SEQ ID NO: 1368 - protein, 7 aa, synthetic construct
  REGION 1..7: note = source = /note="Description of Artificial Sequence: Synthetic peptide"
DASNRAT

SEQ ID NO: 1369 - protein, 7 aa, synthetic construct
  REGION 1..7: note = source = /note="Description of Artificial Sequence: Synthetic peptide"
AASSLQS

SEQ ID NO: 1370 - protein, 7 aa, synthetic construct
  REGION 1..7: note = source = /note="Description of Artificial Sequence: Synthetic peptide"
EVSNRDS

SEQ ID NO: 1371 - protein, 7 aa, synthetic construct
  REGION 1..7: note = source = /note="Description of Artificial Sequence: Synthetic peptide"
DASTLQT

SEQ ID NO: 1372 - protein, 7 aa, synthetic construct
  REGION 1..7: note = source = /note="Description of Artificial Sequence: Synthetic peptide"
GASTRAT

SEQ ID NO: 1373 - protein, 7 aa, synthetic construct
  REGION 1..7: note = source = /note="Description of Artificial Sequence: Synthetic peptide"
GASSRAS

SEQ ID NO: 1374 - protein, 7 aa, synthetic construct
  REGION 1..7: note = source = /note="Description of Artificial Sequence: Synthetic peptide"
SATSPVP

SEQ ID NO: 1375 - protein, 7 aa, synthetic construct
  REGION 1..7: note = source = /note="Description of Artificial Sequence: Synthetic peptide"
AANKSQS

SEQ ID NO: 1376 - protein, 7 aa, synthetic construct
  REGION 1..7: note = source = /note="Description of Artificial Sequence: Synthetic peptide"
LGSNRAS

SEQ ID NO: 1377 - protein, 7 aa, synthetic construct
  REGION 1..7: note = source = /note="Description of Artificial Sequence: Synthetic peptide"
DDSVRPS

SEQ ID NO: 1378 - protein, 7 aa, synthetic construct
  REGION 1..7: note = source = /note="Description of Artificial Sequence: Synthetic peptide"
RDKERPS

SEQ ID NO: 1379 - protein, 7 aa, synthetic construct
  REGION 1..7: note = source = /note="Description of Artificial Sequence: Synthetic peptide"
AASNLQS

SEQ ID NO: 1380 - protein, 7 aa, synthetic construct
  REGION 1..7: note = source = /note="Description of Artificial Sequence: Synthetic peptide"
GKNNRPS

SEQ ID NO: 1381 - protein, 7 aa, synthetic construct
  REGION 1..7: note = source = /note="Description of Artificial Sequence: Synthetic peptide"
GTNNRPS

SEQ ID NO: 1382 - protein, 7 aa, synthetic construct
  REGION 1..7: note = source = /note="Description of Artificial Sequence: Synthetic peptide"
GASTRAT

SEQ ID NO: 1383 - protein, 7 aa, synthetic construct
  REGION 1..7: note = source = /note="Description of Artificial Sequence: Synthetic peptide"
DASSRAT

SEQ ID NO: 1384 - protein, 7 aa, synthetic construct
  REGION 1..7: note = source = /note="Description of Artificial Sequence: Synthetic peptide"
GASSRAT

SEQ ID NO: 1385 - protein, 7 aa, synthetic construct
  REGION 1..7: note = source = /note="Description of Artificial Sequence: Synthetic peptide"
GSSNRAT

SEQ ID NO: 1386 - protein, 7 aa, synthetic construct
  REGION 1..7: note = source = /note="Description of Artificial Sequence: Synthetic peptide"
AASSLQS

SEQ ID NO: 1387 - protein, 7 aa, synthetic construct
  REGION 1..7: note = source = /note="Description of Artificial Sequence: Synthetic peptide"
GASQRAT

SEQ ID NO: 1388 - protein, 7 aa, synthetic construct
  REGION 1..7: note = source = /note="Description of Artificial Sequence: Synthetic peptide"
GASSRAT

SEQ ID NO: 1389 - protein, 7 aa, synthetic construct
  REGION 1..7: note = source = /note="Description of Artificial Sequence: Synthetic peptide"
GASSRAT

SEQ ID NO: 1390 - protein, 7 aa, synthetic construct
  REGION 1..7: note = source = /note="Description of Artificial Sequence: Synthetic peptide"
GASSRAT

SEQ ID NO: 1391 - protein, 7 aa, synthetic construct
  REGION 1..7: note = source = /note="Description of Artificial Sequence: Synthetic peptide"
GASNWAT

SEQ ID NO: 1392 - protein, 7 aa, synthetic construct
  REGION 1..7: note = source = /note="Description of Artificial Sequence: Synthetic peptide"
LGSNRAS

SEQ ID NO: 1393 - protein, 7 aa, synthetic construct
  REGION 1..7: note = source = /note="Description of Artificial Sequence: Synthetic peptide"
GTSSRAT

SEQ ID NO: 1394 - protein, 7 aa, synthetic construct
  REGION 1..7: note = source = /note="Description of Artificial Sequence: Synthetic peptide"
GASGRAT

SEQ ID NO: 1395 - protein, 7 aa, synthetic construct
  REGION 1..7: note = source = /note="Description of Artificial Sequence: Synthetic peptide"
SASYRYT

SEQ ID NO: 1396 - protein, 7 aa, synthetic construct
  REGION 1..7: note = source = /note="Description of Artificial Sequence: Synthetic peptide"
LASNLET

SEQ ID NO: 1397 - protein, 7 aa, synthetic construct
  REGION 1..7: note = source = /note="Description of Artificial Sequence: Synthetic peptide"
LASNVQT

SEQ ID NO: 1398 - protein, 7 aa, synthetic construct
  REGION 1..7: note = source = /note="Description of Artificial Sequence: Synthetic peptide"
LASNVQT

SEQ ID NO: 1399 - protein, 9 aa, synthetic construct
  REGION 1..9: note = source = /note="Description of Artificial Sequence: Synthetic peptide"
QQSYSTPYT

SEQ ID NO: 1400 - protein, 10 aa, synthetic construct
  REGION 1..10: note = source = /note="Description of Artificial Sequence: Synthetic peptide"
QQYHSSPSWT

SEQ ID NO: 1401 - protein, 9 aa, synthetic construct
  REGION 1..9: note = source = /note="Description of Artificial Sequence: Synthetic peptide"
MQALQTPYT

SEQ ID NO: 1402 - protein, 8 aa, synthetic construct
  REGION 1..8: note = source = /note="Description of Artificial Sequence: Synthetic peptide"
MQNIQFPS

SEQ ID NO: 1403 - protein, 9 aa, synthetic construct
  REGION 1..9: note = source = /note="Description of Artificial Sequence: Synthetic peptide"
MQALQTPYT

SEQ ID NO: 1404 - protein, 8 aa, synthetic construct
  REGION 1..8: note = source = /note="Description of Artificial Sequence: Synthetic peptide"
QQSYKRAS

SEQ ID NO: 1405 - protein, 9 aa, synthetic construct
  REGION 1..9: note = source = /note="Description of Artificial Sequence: Synthetic peptide"
MQGRQFPYS

SEQ ID NO: 1406 - protein, 8 aa, synthetic construct
  REGION 1..8: note = source = /note="Description of Artificial Sequence: Synthetic peptide"
QQYGSSLT

SEQ ID NO: 1407 - protein, 9 aa, synthetic construct
  REGION 1..9: note = source = /note="Description of Artificial Sequence: Synthetic peptide"
QQYGSSSWT

SEQ ID NO: 1408 - protein, 10 aa, synthetic construct
  REGION 1..10: note = source = /note="Description of Artificial Sequence: Synthetic peptide"
QQYGSSPPWT

SEQ ID NO: 1409 - protein, 7 aa, synthetic construct
  REGION 1..7: note = source = /note="Description of Artificial Sequence: Synthetic peptide"
QQSYTLA

SEQ ID NO: 1410 - protein, 9 aa, synthetic construct
  REGION 1..9: note = source = /note="Description of Artificial Sequence: Synthetic peptide"
MQGTHWPGT

SEQ ID NO: 1411 - protein, 9 aa, synthetic construct
  REGION 1..9: note = source = /note="Description of Artificial Sequence: Synthetic peptide"
QQYESLPLT

SEQ ID NO: 1412 - protein, 10 aa, synthetic construct
  REGION 1..10: note = source = /note="Description of Artificial Sequence: Synthetic peptide"
QQYNDWLPVT

SEQ ID NO: 1413 - protein, 10 aa, synthetic construct
  REGION 1..10: note = source = /note="Description of Artificial Sequence: Synthetic peptide"
QQYAGSPPFT

SEQ ID NO: 1414 - protein, 9 aa, synthetic construct
  REGION 1..9: note = source = /note="Description of Artificial Sequence: Synthetic peptide"
LQHDNFPLT

SEQ ID NO: 1415 - protein, 9 aa, synthetic construct
  REGION 1..9: note = source = /note="Description of Artificial Sequence: Synthetic peptide"
QHYYRFPYS

SEQ ID NO: 1416 - protein, 9 aa, synthetic construct
  REGION 1..9: note = source = /note="Description of Artificial Sequence: Synthetic peptide"
MQALQTPYT

SEQ ID NO: 1417 - protein, 11 aa, synthetic construct
  REGION 1..11: note = source = /note="Description of Artificial Sequence: Synthetic peptide"
QVWDSDSEHVV

SEQ ID NO: 1418 - protein, 9 aa, synthetic construct
  REGION 1..9: note = source = /note="Description of Artificial Sequence: Synthetic peptide"
QAWDDTTVV

SEQ ID NO: 1419 - protein, 9 aa, synthetic construct
  REGION 1..9: note = source = /note="Description of Artificial Sequence: Synthetic peptide"
QKYNSAPFT

SEQ ID NO: 1420 - protein, 12 aa, synthetic construct
  REGION 1..12: note = source = /note="Description of Artificial Sequence: Synthetic peptide"
SSRDSSGDHLRV

SEQ ID NO: 1421 - protein, 11 aa, synthetic construct
  REGION 1..11: note = source = /note="Description of Artificial Sequence: Synthetic peptide"
NSRDSSGHHLL

SEQ ID NO: 1422 - protein, 14 aa, synthetic construct
  REGION 1..14: note = source = /note="Description of Artificial Sequence: Synthetic peptide"
QHYGSSFNGSSLFT

SEQ ID NO: 1423 - protein, 10 aa, synthetic construct
  REGION 1..10: note = source = /note="Description of Artificial Sequence: Synthetic peptide"
QQFGTSSGLT

SEQ ID NO: 1424 - protein, 10 aa, synthetic construct
  REGION 1..10: note = source = /note="Description of Artificial Sequence: Synthetic peptide"
QQYHSSPSWT

SEQ ID NO: 1425 - protein, 10 aa, synthetic construct
  REGION 1..10: note = source = /note="Description of Artificial Sequence: Synthetic peptide"
QQYHSSPSWT

SEQ ID NO: 1426 - protein, 9 aa, synthetic construct
  REGION 1..9: note = source = /note="Description of Artificial Sequence: Synthetic peptide"
QQSYSTPYS

SEQ ID NO: 1427 - protein, 10 aa, synthetic construct
  REGION 1..10: note = source = /note="Description of Artificial Sequence: Synthetic peptide"
QHYESSPSWT

SEQ ID NO: 1428 - protein, 10 aa, synthetic construct
  REGION 1..10: note = source = /note="Description of Artificial Sequence: Synthetic peptide"
QQYGSPPRFT

SEQ ID NO: 1429 - protein, 10 aa, synthetic construct
  REGION 1..10: note = source = /note="Description of Artificial Sequence: Synthetic peptide"
QHYGSSPSWT

SEQ ID NO: 1430 - protein, 10 aa, synthetic construct
  REGION 1..10: note = source = /note="Description of Artificial Sequence: Synthetic peptide"
QHYDSSPSWT

SEQ ID NO: 1431 - protein, 10 aa, synthetic construct
  REGION 1..10: note = source = /note="Description of Artificial Sequence: Synthetic peptide"
QYYGTSPMYT

SEQ ID NO: 1432 - protein, 9 aa, synthetic construct
  REGION 1..9: note = source = /note="Description of Artificial Sequence: Synthetic peptide"
MQALQTPLT

SEQ ID NO: 1433 - protein, 11 aa, synthetic construct
  REGION 1..11: note = source = /note="Description of Artificial Sequence: Synthetic peptide"
QHYGNSPPKFT

SEQ ID NO: 1434 - protein, 10 aa, synthetic construct
  REGION 1..10: note = source = /note="Description of Artificial Sequence: Synthetic peptide"
QHYGGSPRLT

SEQ ID NO: 1435 - protein, 9 aa, synthetic construct
  REGION 1..9: note = source = /note="Description of Artificial Sequence: Synthetic peptide"
QQHYSTPWT

SEQ ID NO: 1436 - protein, 9 aa, synthetic construct
  REGION 1..9: note = source = /note="Description of Artificial Sequence: Synthetic peptide"
LQSRIFPRT

SEQ ID NO: 1437 - protein, 9 aa, synthetic construct
  REGION 1..9: note = source = /note="Description of Artificial Sequence: Synthetic peptide"
LQSRTIPRT

SEQ ID NO: 1438 - protein, 9 aa, synthetic construct
  REGION 1..9: note = source = /note="Description of Artificial Sequence: Synthetic peptide"
LQSRTIPRT

SEQ ID NO: 1439 - protein, 7 aa, synthetic construct
  REGION 1..7: note = source = /note="Description of Artificial Sequence: Synthetic peptide"
GFALSNH

SEQ ID NO: 1440 - protein, 7 aa, synthetic construct
  REGION 1..7: note = source = /note="Description of Artificial Sequence: Synthetic peptide"
GFTFSNY

SEQ ID NO: 1441 - protein, 7 aa, synthetic construct
  REGION 1..7: note = source = /note="Description of Artificial Sequence: Synthetic peptide"
GFTFDDY

SEQ ID NO: 1442 - protein, 7 aa, synthetic construct
  REGION 1..7: note = source = /note="Description of Artificial Sequence: Synthetic peptide"
GFALSNH

SEQ ID NO: 1443 - protein, 7 aa, synthetic construct
  REGION 1..7: note = source = /note="Description of Artificial Sequence: Synthetic peptide"
GYIFDNF

SEQ ID NO: 1444 - protein, 7 aa, synthetic construct
  REGION 1..7: note = source = /note="Description of Artificial Sequence: Synthetic peptide"
GFTFSSD

SEQ ID NO: 1445 - protein, 7 aa, synthetic construct
  REGION 1..7: note = source = /note="Description of Artificial Sequence: Synthetic peptide"
GYTFSNY

SEQ ID NO: 1446 - protein, 7 aa, synthetic construct
  REGION 1..7: note = source = /note="Description of Artificial Sequence: Synthetic peptide"
GFALSNH

SEQ ID NO: 1447 - protein, 7 aa, synthetic construct
  REGION 1..7: note = source = /note="Description of Artificial Sequence: Synthetic peptide"
GFALSNH

SEQ ID NO: 1448 - protein, 7 aa, synthetic construct
  REGION 1..7: note = source = /note="Description of Artificial Sequence: Synthetic peptide"
GFALSNH

SEQ ID NO: 1449 - protein, 7 aa, synthetic construct
  REGION 1..7: note = source = /note="Description of Artificial Sequence: Synthetic peptide"
GFTFSDY

SEQ ID NO: 1450 - protein, 7 aa, synthetic construct
  REGION 1..7: note = source = /note="Description of Artificial Sequence: Synthetic peptide"
GFTFSDY

SEQ ID NO: 1451 - protein, 7 aa, synthetic construct
  REGION 1..7: note = source = /note="Description of Artificial Sequence: Synthetic peptide"
GFALSNH

SEQ ID NO: 1452 - protein, 7 aa, synthetic construct
  REGION 1..7: note = source = /note="Description of Artificial Sequence: Synthetic peptide"
GFALSNH

SEQ ID NO: 1453 - protein, 7 aa, synthetic construct
  REGION 1..7: note = source = /note="Description of Artificial Sequence: Synthetic peptide"
GFALSNH

SEQ ID NO: 1454 - protein, 9 aa, synthetic construct
  REGION 1..9: note = source = /note="Description of Artificial Sequence: Synthetic peptide"
GGSISSSYY

SEQ ID NO: 1455 - protein, 9 aa, synthetic construct
  REGION 1..9: note = source = /note="Description of Artificial Sequence: Synthetic peptide"
GFSLRTSGM

SEQ ID NO: 1456 - protein, 7 aa, synthetic construct
  REGION 1..7: note = source = /note="Description of Artificial Sequence: Synthetic peptide"
GFTFSSY

SEQ ID NO: 1457 - protein, 7 aa, synthetic construct
  REGION 1..7: note = source = /note="Description of Artificial Sequence: Synthetic peptide"
GFTFSDY

SEQ ID NO: 1458 - protein, 7 aa, synthetic construct
  REGION 1..7: note = source = /note="Description of Artificial Sequence: Synthetic peptide"
GYTVTSH

SEQ ID NO: 1459 - protein, 9 aa, synthetic construct
  REGION 1..9: note = source = /note="Description of Artificial Sequence: Synthetic peptide"
GGSISSGGY

SEQ ID NO: 1460 - protein, 7 aa, synthetic construct
  REGION 1..7: note = source = /note="Description of Artificial Sequence: Synthetic peptide"
GGTFSSY

SEQ ID NO: 1461 - protein, 9 aa, synthetic construct
  REGION 1..9: note = source = /note="Description of Artificial Sequence: Synthetic peptide"
GDSVSSNSA

SEQ ID NO: 1462 - protein, 7 aa, synthetic construct
  REGION 1..7: note = source = /note="Description of Artificial Sequence: Synthetic peptide"
GFTFSSY

SEQ ID NO: 1463 - protein, 7 aa, synthetic construct
  REGION 1..7: note = source = /note="Description of Artificial Sequence: Synthetic peptide"
GITFSRY

SEQ ID NO: 1464 - protein, 7 aa, synthetic construct
  REGION 1..7: note = source = /note="Description of Artificial Sequence: Synthetic peptide"
GFTFSSY

SEQ ID NO: 1465 - protein, 7 aa, synthetic construct
  REGION 1..7: note = source = /note="Description of Artificial Sequence: Synthetic peptide"
GFTFSSY

SEQ ID NO: 1466 - protein, 7 aa, synthetic construct
  REGION 1..7: note = source = /note="Description of Artificial Sequence: Synthetic peptide"
GFTFDDY

SEQ ID NO: 1467 - protein, 7 aa, synthetic construct
  REGION 1..7: note = source = /note="Description of Artificial Sequence: Synthetic peptide"
GFTFDDY

SEQ ID NO: 1468 - protein, 7 aa, synthetic construct
  REGION 1..7: note = source = /note="Description of Artificial Sequence: Synthetic peptide"
GFTFSSY

SEQ ID NO: 1469 - protein, 7 aa, synthetic construct
  REGION 1..7: note = source = /note="Description of Artificial Sequence: Synthetic peptide"
GFTFSSY

SEQ ID NO: 1470 - protein, 7 aa, synthetic construct
  REGION 1..7: note = source = /note="Description of Artificial Sequence: Synthetic peptide"
GFTFSSY

SEQ ID NO: 1471 - protein, 7 aa, synthetic construct
  REGION 1..7: note = source = /note="Description of Artificial Sequence: Synthetic peptide"
GFSFSSY

SEQ ID NO: 1472 - protein, 7 aa, synthetic construct
  REGION 1..7: note = source = /note="Description of Artificial Sequence: Synthetic peptide"
GFTFSSY

SEQ ID NO: 1473 - protein, 7 aa, synthetic construct
  REGION 1..7: note = source = /note="Description of Artificial Sequence: Synthetic peptide"
GFTFSSY

SEQ ID NO: 1474 - protein, 7 aa, synthetic construct
  REGION 1..7: note = source = /note="Description of Artificial Sequence: Synthetic peptide"
GFTFSSY

SEQ ID NO: 1475 - protein, 7 aa, synthetic construct
  REGION 1..7: note = source = /note="Description of Artificial Sequence: Synthetic peptide"
GYTFTNF

SEQ ID NO: 1476 - protein, 7 aa, synthetic construct
  REGION 1..7: note = source = /note="Description of Artificial Sequence: Synthetic peptide"
GYTFTDY

SEQ ID NO: 1477 - protein, 7 aa, synthetic construct
  REGION 1..7: note = source = /note="Description of Artificial Sequence: Synthetic peptide"
GYTFRHY

SEQ ID NO: 1478 - protein, 7 aa, synthetic construct
  REGION 1..7: note = source = /note="Description of Artificial Sequence: Synthetic peptide"
GYTFTHY

SEQ ID NO: 1479 - protein, 5 aa, synthetic construct
  REGION 1..5: note = source = /note="Description of Artificial Sequence: Synthetic peptide"
VYSGS

SEQ ID NO: 1480 - protein, 6 aa, synthetic construct
  REGION 1..6: note = source = /note="Description of Artificial Sequence: Synthetic peptide"
SRSGEN

SEQ ID NO: 1481 - protein, 6 aa, synthetic construct
  REGION 1..6: note = source = /note="Description of Artificial Sequence: Synthetic peptide"
SWNSGS

SEQ ID NO: 1482 - protein, 5 aa, synthetic construct
  REGION 1..5: note = source = /note="Description of Artificial Sequence: Synthetic peptide"
VYSGS

SEQ ID NO: 1483 - protein, 6 aa, synthetic construct
  REGION 1..6: note = source = /note="Description of Artificial Sequence: Synthetic peptide"
NPKNNN

SEQ ID NO: 1484 - protein, 6 aa, synthetic construct
  REGION 1..6: note = source = /note="Description of Artificial Sequence: Synthetic peptide"
SGSGGT

SEQ ID NO: 1485 - protein, 6 aa, synthetic construct
  REGION 1..6: note = source = /note="Description of Artificial Sequence: Synthetic peptide"
SAYNGN

SEQ ID NO: 1486 - protein, 5 aa, synthetic construct
  REGION 1..5: note = source = /note="Description of Artificial Sequence: Synthetic peptide"
VYSGS

SEQ ID NO: 1487 - protein, 5 aa, synthetic construct
  REGION 1..5: note = source = /note="Description of Artificial Sequence: Synthetic peptide"
VYSGS

SEQ ID NO: 1488 - protein, 5 aa, synthetic construct
  REGION 1..5: note = source = /note="Description of Artificial Sequence: Synthetic peptide"
VYSGS

SEQ ID NO: 1489 - protein, 6 aa, synthetic construct
  REGION 1..6: note = source = /note="Description of Artificial Sequence: Synthetic peptide"
SSSGST

SEQ ID NO: 1490 - protein, 6 aa, synthetic construct
  REGION 1..6: note = source = /note="Description of Artificial Sequence: Synthetic peptide"
SSSGNT

SEQ ID NO: 1491 - protein, 5 aa, synthetic construct
  REGION 1..5: note = source = /note="Description of Artificial Sequence: Synthetic peptide"
VYSGS

SEQ ID NO: 1492 - protein, 5 aa, synthetic construct
  REGION 1..5: note = source = /note="Description of Artificial Sequence: Synthetic peptide"
VYSGS

SEQ ID NO: 1493 - protein, 5 aa, synthetic construct
  REGION 1..5: note = source = /note="Description of Artificial Sequence: Synthetic peptide"
VYSGS

SEQ ID NO: 1494 - protein, 5 aa, synthetic construct
  REGION 1..5: note = source = /note="Description of Artificial Sequence: Synthetic peptide"
YYSGS

SEQ ID NO: 1495 - protein, 5 aa, synthetic construct
  REGION 1..5: note = source = /note="Description of Artificial Sequence: Synthetic peptide"
DWDED

SEQ ID NO: 1496 - protein, 6 aa, synthetic construct
  REGION 1..6: note = source = /note="Description of Artificial Sequence: Synthetic peptide"
SSSSSY

SEQ ID NO: 1497 - protein, 6 aa, synthetic construct
  REGION 1..6: note = source = /note="Description of Artificial Sequence: Synthetic peptide"
SSSGST

SEQ ID NO: 1498 - protein, 6 aa, synthetic construct
  REGION 1..6: note = source = /note="Description of Artificial Sequence: Synthetic peptide"
NPSGGV

SEQ ID NO: 1499 - protein, 5 aa, synthetic construct
  REGION 1..5: note = source = /note="Description of Artificial Sequence: Synthetic peptide"
YYSGS

SEQ ID NO: 1500 - protein, 6 aa, synthetic construct
  REGION 1..6: note = source = /note="Description of Artificial Sequence: Synthetic peptide"
IPIFGT

SEQ ID NO: 1501 - protein, 7 aa, synthetic construct
  REGION 1..7: note = source = /note="Description of Artificial Sequence: Synthetic peptide"
YYRSKWY

SEQ ID NO: 1502 - protein, 6 aa, synthetic construct
  REGION 1..6: note = source = /note="Description of Artificial Sequence: Synthetic peptide"
SGSGGS

SEQ ID NO: 1503 - protein, 6 aa, synthetic construct
  REGION 1..6: note = source = /note="Description of Artificial Sequence: Synthetic peptide"
SDSGVS

SEQ ID NO: 1504 - protein, 6 aa, synthetic construct
  REGION 1..6: note = source = /note="Description of Artificial Sequence: Synthetic peptide"
SGSGGS

SEQ ID NO: 1505 - protein, 6 aa, synthetic construct
  REGION 1..6: note = source = /note="Description of Artificial Sequence: Synthetic peptide"
SGSGGS

SEQ ID NO: 1506 - protein, 6 aa, synthetic construct
  REGION 1..6: note = source = /note="Description of Artificial Sequence: Synthetic peptide"
SWNSGS

SEQ ID NO: 1507 - protein, 6 aa, synthetic construct
  REGION 1..6: note = source = /note="Description of Artificial Sequence: Synthetic peptide"
NWKGNS

SEQ ID NO: 1508 - protein, 6 aa, synthetic construct
  REGION 1..6: note = source = /note="Description of Artificial Sequence: Synthetic peptide"
SGSGGS

SEQ ID NO: 1509 - protein, 6 aa, synthetic construct
  REGION 1..6: note = source = /note="Description of Artificial Sequence: Synthetic peptide"
SGSGGS

SEQ ID NO: 1510 - protein, 6 aa, synthetic construct
  REGION 1..6: note = source = /note="Description of Artificial Sequence: Synthetic peptide"
SGSGGS

SEQ ID NO: 1511 - protein, 6 aa, synthetic construct
  REGION 1..6: note = source = /note="Description of Artificial Sequence: Synthetic peptide"
SGSGGS

SEQ ID NO: 1512 - protein, 6 aa, synthetic construct
  REGION 1..6: note = source = /note="Description of Artificial Sequence: Synthetic peptide"
SGSGGS

SEQ ID NO: 1513 - protein, 6 aa, synthetic construct
  REGION 1..6: note = source = /note="Description of Artificial Sequence: Synthetic peptide"
SGSGGS

SEQ ID NO: 1514 - protein, 6 aa, synthetic construct
  REGION 1..6: note = source = /note="Description of Artificial Sequence: Synthetic peptide"
SGSGGS

SEQ ID NO: 1515 - protein, 6 aa, synthetic construct
  REGION 1..6: note = source = /note="Description of Artificial Sequence: Synthetic peptide"
NTYTGE

SEQ ID NO: 1516 - protein, 6 aa, synthetic construct
  REGION 1..6: note = source = /note="Description of Artificial Sequence: Synthetic peptide"
NTETRE

SEQ ID NO: 1517 - protein, 6 aa, synthetic construct
  REGION 1..6: note = source = /note="Description of Artificial Sequence: Synthetic peptide"
NTESGV

SEQ ID NO: 1518 - protein, 6 aa, synthetic construct
  REGION 1..6: note = source = /note="Description of Artificial Sequence: Synthetic peptide"
NTETGE

SEQ ID NO: 1519 - protein, 7 aa, synthetic construct
  REGION 1..7: note = source = /note="Description of Artificial Sequence: Synthetic peptide"
HGGESDV

SEQ ID NO: 1520 - protein, 11 aa, synthetic construct
  REGION 1..11: note = source = /note="Description of Artificial Sequence: Synthetic peptide"
SPAHYYGGMDV

SEQ ID NO: 1521 - protein, 6 aa, synthetic construct
  REGION 1..6: note = source = /note="Description of Artificial Sequence: Synthetic peptide"
HSFLAY

SEQ ID NO: 1522 - protein, 7 aa, synthetic construct
  REGION 1..7: note = source = /note="Description of Artificial Sequence: Synthetic peptide"
HGGESDV

SEQ ID NO: 1523 - protein, 11 aa, synthetic construct
  REGION 1..11: note = source = /note="Description of Artificial Sequence: Synthetic peptide"
GPYYYQSYMDV

SEQ ID NO: 1524 - protein, 14 aa, synthetic construct
  REGION 1..14: note = source = /note="Description of Artificial Sequence: Synthetic peptide"
LDSSGYYYARGPRY

SEQ ID NO: 1525 - protein, 9 aa, synthetic construct
  REGION 1..9: note = source = /note="Description of Artificial Sequence: Synthetic peptide"
GPYYYYMDV

SEQ ID NO: 1526 - protein, 7 aa, synthetic construct
  REGION 1..7: note = source = /note="Description of Artificial Sequence: Synthetic peptide"
HGGESDV

SEQ ID NO: 1527 - protein, 7 aa, synthetic construct
  REGION 1..7: note = source = /note="Description of Artificial Sequence: Synthetic peptide"
HGGESDV

SEQ ID NO: 1528 - protein, 7 aa, synthetic construct
  REGION 1..7: note = source = /note="Description of Artificial Sequence: Synthetic peptide"
HGGESDV

SEQ ID NO: 1529 - protein, 8 aa, synthetic construct
  REGION 1..8: note = source = /note="Description of Artificial Sequence: Synthetic peptide"
ESGDGMDV

SEQ ID NO: 1530 - protein, 8 aa, synthetic construct
  REGION 1..8: note = source = /note="Description of Artificial Sequence: Synthetic peptide"
STMVREDY

SEQ ID NO: 1531 - protein, 7 aa, synthetic construct
  REGION 1..7: note = source = /note="Description of Artificial Sequence: Synthetic peptide"
HGGESDV

SEQ ID NO: 1532 - protein, 7 aa, synthetic construct
  REGION 1..7: note = source = /note="Description of Artificial Sequence: Synthetic peptide"
HGGESDV

SEQ ID NO: 1533 - protein, 7 aa, synthetic construct
  REGION 1..7: note = source = /note="Description of Artificial Sequence: Synthetic peptide"
HGGESDV

SEQ ID NO: 1534 - protein, 11 aa, synthetic construct
  REGION 1..11: note = source = /note="Description of Artificial Sequence: Synthetic peptide"
HWQEWPDAFDI

SEQ ID NO: 1535 - protein, 13 aa, synthetic construct
  REGION 1..13: note = source = /note="Description of Artificial Sequence: Synthetic peptide"
SGAGGTSATAFDI

SEQ ID NO: 1536 - protein, 10 aa, synthetic construct
  REGION 1..10: note = source = /note="Description of Artificial Sequence: Synthetic peptide"
TIAAVYAFDI

SEQ ID NO: 1537 - protein, 8 aa, synthetic construct
  REGION 1..8: note = source = /note="Description of Artificial Sequence: Synthetic peptide"
DLRGAFDI

SEQ ID NO: 1538 - protein, 11 aa, synthetic construct
  REGION 1..11: note = source = /note="Description of Artificial Sequence: Synthetic peptide"
EGSGSGWYFDF

SEQ ID NO: 1539 - protein, 13 aa, synthetic construct
  REGION 1..13: note = source = /note="Description of Artificial Sequence: Synthetic peptide"
AGIAARLRGAFDI

SEQ ID NO: 1540 - protein, 20 aa, synthetic construct
  REGION 1..20: note = source = /note="Description of Artificial Sequence: Synthetic peptide"
RGGYQLLRWDVGLLRSAFDI

SEQ ID NO: 1541 - protein, 13 aa, synthetic construct
  REGION 1..13: note = source = /note="Description of Artificial Sequence: Synthetic peptide"
SSPEGLFLYWFDP

SEQ ID NO: 1542 - protein, 9 aa, synthetic construct
  REGION 1..9: note = source = /note="Description of Artificial Sequence: Synthetic peptide"
VEGSGSLDY

SEQ ID NO: 1543 - protein, 9 aa, synthetic construct
  REGION 1..9: note = source = /note="Description of Artificial Sequence: Synthetic peptide"
RAGSEASDI

SEQ ID NO: 1544 - protein, 15 aa, synthetic construct
  REGION 1..15: note = source = /note="Description of Artificial Sequence: Synthetic peptide"
ATYKRELRYYYGMDV

SEQ ID NO: 1545 - protein, 15 aa, synthetic construct
  REGION 1..15: note = source = /note="Description of Artificial Sequence: Synthetic peptide"
ATYKRELRYYYGMDV

SEQ ID NO: 1546 - protein, 8 aa, synthetic construct
  REGION 1..8: note = source = /note="Description of Artificial Sequence: Synthetic peptide"
VGKAVPDV

SEQ ID NO: 1547 - protein, 13 aa, synthetic construct
  REGION 1..13: note = source = /note="Description of Artificial Sequence: Synthetic peptide"
HQGVAYYNYAMDV

SEQ ID NO: 1548 - protein, 8 aa, synthetic construct
  REGION 1..8: note = source = /note="Description of Artificial Sequence: Synthetic peptide"
VVRDGMDV

SEQ ID NO: 1549 - protein, 9 aa, synthetic construct
  REGION 1..9: note = source = /note="Description of Artificial Sequence: Synthetic peptide"
IPQTGTFDY

SEQ ID NO: 1550 - protein, 15 aa, synthetic construct
  REGION 1..15: note = source = /note="Description of Artificial Sequence: Synthetic peptide"
ANYKRELRYYYGMDV

SEQ ID NO: 1551 - protein, 11 aa, synthetic construct
  REGION 1..11: note = source = /note="Description of Artificial Sequence: Synthetic peptide"
ALVGATGAFDI

SEQ ID NO: 1552 - protein, 8 aa, synthetic construct
  REGION 1..8: note = source = /note="Description of Artificial Sequence: Synthetic peptide"
WFGEGFDP

SEQ ID NO: 1553 - protein, 17 aa, synthetic construct
  REGION 1..17: note = source = /note="Description of Artificial Sequence: Synthetic peptide"
VGYDSSGYYRDYYGMDV

SEQ ID NO: 1554 - protein, 13 aa, synthetic construct
  REGION 1..13: note = source = /note="Description of Artificial Sequence: Synthetic peptide"
MGWSSGYLGAFDI

SEQ ID NO: 1555 - protein, 13 aa, synthetic construct
  REGION 1..13: note = source = /note="Description of Artificial Sequence: Synthetic peptide"
GEIYYGYDGGFAY

SEQ ID NO: 1556 - protein, 8 aa, synthetic construct
  REGION 1..8: note = source = /note="Description of Artificial Sequence: Synthetic peptide"
DYSYAMDY

SEQ ID NO: 1557 - protein, 8 aa, synthetic construct
  REGION 1..8: note = source = /note="Description of Artificial Sequence: Synthetic peptide"
DYLYSLDF

SEQ ID NO: 1558 - protein, 8 aa, synthetic construct
  REGION 1..8: note = source = /note="Description of Artificial Sequence: Synthetic peptide"
DYLYSCDY

SEQ ID NO: 1559 - protein, 7 aa, synthetic construct
  REGION 1..7: note = source = /note="Description of Artificial Sequence: Synthetic peptide"
SQSISSY

SEQ ID NO: 1560 - protein, 8 aa, synthetic construct
  REGION 1..8: note = source = /note="Description of Artificial Sequence: Synthetic peptide"
SQSISSSF

SEQ ID NO: 1561 - protein, 12 aa, synthetic construct
  REGION 1..12: note = source = /note="Description of Artificial Sequence: Synthetic peptide"
SQSLLHSNGYNY

SEQ ID NO: 1562 - protein, 12 aa, synthetic construct
  REGION 1..12: note = source = /note="Description of Artificial Sequence: Synthetic peptide"
SQSLLRNDGKTP

SEQ ID NO: 1563 - protein, 12 aa, synthetic construct
  REGION 1..12: note = source = /note="Description of Artificial Sequence: Synthetic peptide"
SQSLLHSNGYNY

SEQ ID NO: 1564 - protein, 7 aa, synthetic construct
  REGION 1..7: note = source = /note="Description of Artificial Sequence: Synthetic peptide"
SQSISSY

SEQ ID NO: 1565 - protein, 12 aa, synthetic construct
  REGION 1..12: note = source = /note="Description of Artificial Sequence: Synthetic peptide"
SQSLLYSNGYNY

SEQ ID NO: 1566 - protein, 7 aa, synthetic construct
  REGION 1..7: note = source = /note="Description of Artificial Sequence: Synthetic peptide"
SQSVSSN

SEQ ID NO: 1567 - protein, 7 aa, synthetic construct
  REGION 1..7: note = source = /note="Description of Artificial Sequence: Synthetic peptide"
SQSVSSK

SEQ ID NO: 1568 - protein, 8 aa, synthetic construct
  REGION 1..8: note = source = /note="Description of Artificial Sequence: Synthetic peptide"
SQSVGSTN

SEQ ID NO: 1569 - protein, 7 aa, synthetic construct
  REGION 1..7: note = source = /note="Description of Artificial Sequence: Synthetic peptide"
SQSISSY

SEQ ID NO: 1570 - protein, 12 aa, synthetic construct
  REGION 1..12: note = source = /note="Description of Artificial Sequence: Synthetic peptide"
SESLVHNSGKTY

SEQ ID NO: 1571 - protein, 7 aa, synthetic construct
  REGION 1..7: note = source = /note="Description of Artificial Sequence: Synthetic peptide"
SEDINKF

SEQ ID NO: 1572 - protein, 7 aa, synthetic construct
  REGION 1..7: note = source = /note="Description of Artificial Sequence: Synthetic peptide"
SQSVGSN

SEQ ID NO: 1573 - protein, 8 aa, synthetic construct
  REGION 1..8: note = source = /note="Description of Artificial Sequence: Synthetic peptide"
SQSIGSSS

SEQ ID NO: 1574 - protein, 7 aa, synthetic construct
  REGION 1..7: note = source = /note="Description of Artificial Sequence: Synthetic peptide"
SQDIDDA

SEQ ID NO: 1575 - protein, 7 aa, synthetic construct
  REGION 1..7: note = source = /note="Description of Artificial Sequence: Synthetic peptide"
SQDIYNN

SEQ ID NO: 1576 - protein, 12 aa, synthetic construct
  REGION 1..12: note = source = /note="Description of Artificial Sequence: Synthetic peptide"
SQSLLHSNGYNY

SEQ ID NO: 1577 - protein, 7 aa, synthetic construct
  REGION 1..7: note = source = /note="Description of Artificial Sequence: Synthetic peptide"
NNIGTKS

SEQ ID NO: 1578 - protein, 7 aa, synthetic construct
  REGION 1..7: note = source = /note="Description of Artificial Sequence: Synthetic peptide"
DGLSKKY

SEQ ID NO: 1579 - protein, 7 aa, synthetic construct
  REGION 1..7: note = source = /note="Description of Artificial Sequence: Synthetic peptide"
SQGIRNW

SEQ ID NO: 1580 - protein, 7 aa, synthetic construct
  REGION 1..7: note = source = /note="Description of Artificial Sequence: Synthetic peptide"
NNIGSKS

SEQ ID NO: 1581 - protein, 7 aa, synthetic construct
  REGION 1..7: note = source = /note="Description of Artificial Sequence: Synthetic peptide"
DSLGNYY

SEQ ID NO: 1582 - protein, 8 aa, synthetic construct
  REGION 1..8: note = source = /note="Description of Artificial Sequence: Synthetic peptide"
SQSVSSAY

SEQ ID NO: 1583 - protein, 7 aa, synthetic construct
  REGION 1..7: note = source = /note="Description of Artificial Sequence: Synthetic peptide"
SQSVSNS

SEQ ID NO: 1584 - protein, 8 aa, synthetic construct
  REGION 1..8: note = source = /note="Description of Artificial Sequence: Synthetic peptide"
SQSVSSSF

SEQ ID NO: 1585 - protein, 8 aa, synthetic construct
  REGION 1..8: note = source = /note="Description of Artificial Sequence: Synthetic peptide"
SQSVSTTF

SEQ ID NO: 1586 - protein, 7 aa, synthetic construct
  REGION 1..7: note = source = /note="Description of Artificial Sequence: Synthetic peptide"
SQSISSY

SEQ ID NO: 1587 - protein, 8 aa, synthetic construct
  REGION 1..8: note = source = /note="Description of Artificial Sequence: Synthetic peptide"
TQSIGSSF

SEQ ID NO: 1588 - protein, 8 aa, synthetic construct
  REGION 1..8: note = source = /note="Description of Artificial Sequence: Synthetic peptide"
SQSVSSSY

SEQ ID NO: 1589 - protein, 8 aa, synthetic construct
  REGION 1..8: note = source = /note="Description of Artificial Sequence: Synthetic peptide"
SQSVSSSY

SEQ ID NO: 1590 - protein, 8 aa, synthetic construct
  REGION 1..8: note = source = /note="Description of Artificial Sequence: Synthetic peptide"
SQRVASNY

SEQ ID NO: 1591 - protein, 8 aa, synthetic construct
  REGION 1..8: note = source = /note="Description of Artificial Sequence: Synthetic peptide"
SQSLSSNF

SEQ ID NO: 1592 - protein, 12 aa, synthetic construct
  REGION 1..12: note = source = /note="Description of Artificial Sequence: Synthetic peptide"
SQSLLHSNGYNY

SEQ ID NO: 1593 - protein, 8 aa, synthetic construct
  REGION 1..8: note = source = /note="Description of Artificial Sequence: Synthetic peptide"
SQSVSSSY

SEQ ID NO: 1594 - protein, 8 aa, synthetic construct
  REGION 1..8: note = source = /note="Description of Artificial Sequence: Synthetic peptide"
SQSVASSF

SEQ ID NO: 1595 - protein, 7 aa, synthetic construct
  REGION 1..7: note = source = /note="Description of Artificial Sequence: Synthetic peptide"
SQDVNTA

SEQ ID NO: 1596 - protein, 11 aa, synthetic construct
  REGION 1..11: note = source = /note="Description of Artificial Sequence: Synthetic peptide"
SESVSVIGAHL

SEQ ID NO: 1597 - protein, 11 aa, synthetic construct
  REGION 1..11: note = source = /note="Description of Artificial Sequence: Synthetic peptide"
SESVTILGSHL

SEQ ID NO: 1598 - protein, 11 aa, synthetic construct
  REGION 1..11: note = source = /note="Description of Artificial Sequence: Synthetic peptide"
SESVTILGSHL

SEQ ID NO: 1599-1638 - skipped (40 entries)

SEQ ID NO: 1639 - protein, 6 aa, synthetic construct
  REGION 1..6: note = source = /note="Description of Artificial Sequence: Synthetic peptide"
SYSTPY

SEQ ID NO: 1640 - protein, 7 aa, synthetic construct
  REGION 1..7: note = source = /note="Description of Artificial Sequence: Synthetic peptide"
YHSSPSW

SEQ ID NO: 1641 - protein, 6 aa, synthetic construct
  REGION 1..6: note = source = /note="Description of Artificial Sequence: Synthetic peptide"
ALQTPY

SEQ ID NO: 1642 - protein, 5 aa, synthetic construct
  REGION 1..5: note = source = /note="Description of Artificial Sequence: Synthetic peptide"
NIQFP

SEQ ID NO: 1643 - protein, 6 aa, synthetic construct
  REGION 1..6: note = source = /note="Description of Artificial Sequence: Synthetic peptide"
ALQTPY

SEQ ID NO: 1644 - protein, 5 aa, synthetic construct
  REGION 1..5: note = source = /note="Description of Artificial Sequence: Synthetic peptide"
SYKRA

SEQ ID NO: 1645 - protein, 6 aa, synthetic construct
  REGION 1..6: note = source = /note="Description of Artificial Sequence: Synthetic peptide"
GRQFPY

SEQ ID NO: 1646 - protein, 5 aa, synthetic construct
  REGION 1..5: note = source = /note="Description of Artificial Sequence: Synthetic peptide"
YGSSL

SEQ ID NO: 1647 - protein, 6 aa, synthetic construct
  REGION 1..6: note = source = /note="Description of Artificial Sequence: Synthetic peptide"
YGSSSW

SEQ ID NO: 1648 - protein, 7 aa, synthetic construct
  REGION 1..7: note = source = /note="Description of Artificial Sequence: Synthetic peptide"
YGSSPPW

SEQ ID NO: 1649 - protein, 4 aa, synthetic construct
  REGION 1..4: note = source = /note="Description of Artificial Sequence: Synthetic peptide"
SYTL

SEQ ID NO: 1650 - protein, 6 aa, synthetic construct
  REGION 1..6: note = source = /note="Description of Artificial Sequence: Synthetic peptide"
GTHWPG

SEQ ID NO: 1651 - protein, 6 aa, synthetic construct
  REGION 1..6: note = source = /note="Description of Artificial Sequence: Synthetic peptide"
YESLPL

SEQ ID NO: 1652 - protein, 7 aa, synthetic construct
  REGION 1..7: note = source = /note="Description of Artificial Sequence: Synthetic peptide"
YNDWLPV

SEQ ID NO: 1653 - protein, 7 aa, synthetic construct
  REGION 1..7: note = source = /note="Description of Artificial Sequence: Synthetic peptide"
YAGSPPF

SEQ ID NO: 1654 - protein, 6 aa, synthetic construct
  REGION 1..6: note = source = /note="Description of Artificial Sequence: Synthetic peptide"
HDNFPL

SEQ ID NO: 1655 - protein, 6 aa, synthetic construct
  REGION 1..6: note = source = /note="Description of Artificial Sequence: Synthetic peptide"
YYRFPY

SEQ ID NO: 1656 - protein, 6 aa, synthetic construct
  REGION 1..6: note = source = /note="Description of Artificial Sequence: Synthetic peptide"
ALQTPY

SEQ ID NO: 1657 - protein, 8 aa, synthetic construct
  REGION 1..8: note = source = /note="Description of Artificial Sequence: Synthetic peptide"
WDSDSEHV

SEQ ID NO: 1658 - protein, 6 aa, synthetic construct
  REGION 1..6: note = source = /note="Description of Artificial Sequence: Synthetic peptide"
WDDTTV

SEQ ID NO: 1659 - protein, 6 aa, synthetic construct
  REGION 1..6: note = source = /note="Description of Artificial Sequence: Synthetic peptide"
YNSAPF

SEQ ID NO: 1660 - protein, 9 aa, synthetic construct
  REGION 1..9: note = source = /note="Description of Artificial Sequence: Synthetic peptide"
RDSSGDHLR

SEQ ID NO: 1661 - protein, 8 aa, synthetic construct
  REGION 1..8: note = source = /note="Description of Artificial Sequence: Synthetic peptide"
RDSSGHHL

SEQ ID NO: 1662 - protein, 11 aa, synthetic construct
  REGION 1..11: note = source = /note="Description of Artificial Sequence: Synthetic peptide"
YGSSFNGSSLF

SEQ ID NO: 1663 - protein, 7 aa, synthetic construct
  REGION 1..7: note = source = /note="Description of Artificial Sequence: Synthetic peptide"
FGTSSGL

SEQ ID NO: 1664 - protein, 7 aa, synthetic construct
  REGION 1..7: note = source = /note="Description of Artificial Sequence: Synthetic peptide"
YHSSPSW

SEQ ID NO: 1665 - protein, 7 aa, synthetic construct
  REGION 1..7: note = source = /note="Description of Artificial Sequence: Synthetic peptide"
YHSSPSW

SEQ ID NO: 1666 - protein, 6 aa, synthetic construct
  REGION 1..6: note = source = /note="Description of Artificial Sequence: Synthetic peptide"
SYSTPY

SEQ ID NO: 1667 - protein, 7 aa, synthetic construct
  REGION 1..7: note = source = /note="Description of Artificial Sequence: Synthetic peptide"
YESSPSW

SEQ ID NO: 1668 - protein, 7 aa, synthetic construct
  REGION 1..7: note = source = /note="Description of Artificial Sequence: Synthetic peptide"
YGSPPRF

SEQ ID NO: 1669 - protein, 7 aa, synthetic construct
  REGION 1..7: note = source = /note="Description of Artificial Sequence: Synthetic peptide"
YGSSPSW

SEQ ID NO: 1670 - protein, 7 aa, synthetic construct
  REGION 1..7: note = source = /note="Description of Artificial Sequence: Synthetic peptide"
YDSSPSW

SEQ ID NO: 1671 - protein, 7 aa, synthetic construct
  REGION 1..7: note = source = /note="Description of Artificial Sequence: Synthetic peptide"
YGTSPMY

SEQ ID NO: 1672 - protein, 6 aa, synthetic construct
  REGION 1..6: note = source = /note="Description of Artificial Sequence: Synthetic peptide"
ALQTPL

SEQ ID NO: 1673 - protein, 8 aa, synthetic construct
  REGION 1..8: note = source = /note="Description of Artificial Sequence: Synthetic peptide"
YGNSPPKF

SEQ ID NO: 1674 - protein, 7 aa, synthetic construct
  REGION 1..7: note = source = /note="Description of Artificial Sequence: Synthetic peptide"
YGGSPRL

SEQ ID NO: 1675 - protein, 6 aa, synthetic construct
  REGION 1..6: note = source = /note="Description of Artificial Sequence: Synthetic peptide"
HYSTPW

SEQ ID NO: 1676 - protein, 6 aa, synthetic construct
  REGION 1..6: note = source = /note="Description of Artificial Sequence: Synthetic peptide"
SRIFPR

SEQ ID NO: 1677 - protein, 6 aa, synthetic construct
  REGION 1..6: note = source = /note="Description of Artificial Sequence: Synthetic peptide"
SRTIPR

SEQ ID NO: 1678 - protein, 6 aa, synthetic construct
  REGION 1..6: note = source = /note="Description of Artificial Sequence: Synthetic peptide"
SRTIPR

SEQ ID NO: 1679 - protein, 10 aa, synthetic construct
  REGION 1..10: note = source = /note="Description of Artificial Sequence: Synthetic peptide"
GFALSNHGMS

SEQ ID NO: 1680 - protein, 10 aa, synthetic construct
  REGION 1..10: note = source = /note="Description of Artificial Sequence: Synthetic peptide"
GFTFSNYAMS

SEQ ID NO: 1681 - protein, 10 aa, synthetic construct
  REGION 1..10: note = source = /note="Description of Artificial Sequence: Synthetic peptide"
GFTFDDYAMH

SEQ ID NO: 1682 - protein, 10 aa, synthetic construct
  REGION 1..10: note = source = /note="Description of Artificial Sequence: Synthetic peptide"
GFALSNHGMS

SEQ ID NO: 1683 - protein, 10 aa, synthetic construct
  REGION 1..10: note = source = /note="Description of Artificial Sequence: Synthetic peptide"
GYIFDNFGIN

SEQ ID NO: 1684 - protein, 10 aa, synthetic construct
  REGION 1..10: note = source = /note="Description of Artificial Sequence: Synthetic peptide"
GFTFSSDAMT

SEQ ID NO: 1685 - protein, 10 aa, synthetic construct
  REGION 1..10: note = source = /note="Description of Artificial Sequence: Synthetic peptide"
GYTFSNYGIT

SEQ ID NO: 1686 - protein, 10 aa, synthetic construct
  REGION 1..10: note = source = /note="Description of Artificial Sequence: Synthetic peptide"
GFALSNHGMS

SEQ ID NO: 1687 - protein, 10 aa, synthetic construct
  REGION 1..10: note = source = /note="Description of Artificial Sequence: Synthetic peptide"
GFALSNHGMS

SEQ ID NO: 1688 - protein, 10 aa, synthetic construct
  REGION 1..10: note = source = /note="Description of Artificial Sequence: Synthetic peptide"
GFALSNHGMS

SEQ ID NO: 1689 - protein, 10 aa, synthetic construct
  REGION 1..10: note = source = /note="Description of Artificial Sequence: Synthetic peptide"
GFTFSDYYMS

SEQ ID NO: 1690 - protein, 10 aa, synthetic construct
  REGION 1..10: note = source = /note="Description of Artificial Sequence: Synthetic peptide"
GFTFSDYYMS

SEQ ID NO: 1691 - protein, 10 aa, synthetic construct
  REGION 1..10: note = source = /note="Description of Artificial Sequence: Synthetic peptide"
GFALSNHGMS

SEQ ID NO: 1692 - protein, 10 aa, synthetic construct
  REGION 1..10: note = source = /note="Description of Artificial Sequence: Synthetic peptide"
GFALSNHGMS

SEQ ID NO: 1693 - protein, 10 aa, synthetic construct
  REGION 1..10: note = source = /note="Description of Artificial Sequence: Synthetic peptide"
GFALSNHGMS

SEQ ID NO: 1694 - protein, 12 aa, synthetic construct
  REGION 1..12: note = source = /note="Description of Artificial Sequence: Synthetic peptide"
GGSISSSYYYWG

SEQ ID NO: 1695 - protein, 12 aa, synthetic construct
  REGION 1..12: note = source = /note="Description of Artificial Sequence: Synthetic peptide"
GFSLRTSGMCVS

SEQ ID NO: 1696 - protein, 10 aa, synthetic construct
  REGION 1..10: note = source = /note="Description of Artificial Sequence: Synthetic peptide"
GFTFSSYSMN

SEQ ID NO: 1697 - protein, 10 aa, synthetic construct
  REGION 1..10: note = source = /note="Description of Artificial Sequence: Synthetic peptide"
GFTFSDYYMS

SEQ ID NO: 1698 - protein, 10 aa, synthetic construct
  REGION 1..10: note = source = /note="Description of Artificial Sequence: Synthetic peptide"
GYTVTSHYIH

SEQ ID NO: 1699 - protein, 12 aa, synthetic construct
  REGION 1..12: note = source = /note="Description of Artificial Sequence: Synthetic peptide"
GGSISSGGYYWS

SEQ ID NO: 1700 - protein, 10 aa, synthetic construct
  REGION 1..10: note = source = /note="Description of Artificial Sequence: Synthetic peptide"
GGTFSSYAIS

SEQ ID NO: 1701 - protein, 12 aa, synthetic construct
  REGION 1..12: note = source = /note="Description of Artificial Sequence: Synthetic peptide"
GDSVSSNSAAWN

SEQ ID NO: 1702 - protein, 10 aa, synthetic construct
  REGION 1..10: note = source = /note="Description of Artificial Sequence: Synthetic peptide"
GFTFSSYAMS

SEQ ID NO: 1703 - protein, 10 aa, synthetic construct
  REGION 1..10: note = source = /note="Description of Artificial Sequence: Synthetic peptide"
GITFSRYPMS

SEQ ID NO: 1704 - protein, 10 aa, synthetic construct
  REGION 1..10: note = source = /note="Description of Artificial Sequence: Synthetic peptide"
GFTFSSYAMS

SEQ ID NO: 1705 - protein, 10 aa, synthetic construct
  REGION 1..10: note = source = /note="Description of Artificial Sequence: Synthetic peptide"
GFTFSSYAMS

SEQ ID NO: 1706 - protein, 10 aa, synthetic construct
  REGION 1..10: note = source = /note="Description of Artificial Sequence: Synthetic peptide"
GFTFDDYAMH

SEQ ID NO: 1707 - protein, 10 aa, synthetic construct
  REGION 1..10: note = source = /note="Description of Artificial Sequence: Synthetic peptide"
GFTFDDYAMH

SEQ ID NO: 1708 - protein, 10 aa, synthetic construct
  REGION 1..10: note = source = /note="Description of Artificial Sequence: Synthetic peptide"
GFTFSSYAMS

SEQ ID NO: 1709 - protein, 10 aa, synthetic construct
  REGION 1..10: note = source = /note="Description of Artificial Sequence: Synthetic peptide"
GFTFSSYAMS

SEQ ID NO: 1710 - protein, 10 aa, synthetic construct
  REGION 1..10: note = source = /note="Description of Artificial Sequence: Synthetic peptide"
GFTFSSYAMS

SEQ ID NO: 1711 - protein, 10 aa, synthetic construct
  REGION 1..10: note = source = /note="Description of Artificial Sequence: Synthetic peptide"
GFSFSSYAMS

SEQ ID NO: 1712 - protein, 10 aa, synthetic construct
  REGION 1..10: note = source = /note="Description of Artificial Sequence: Synthetic peptide"
GFTFSSYAMS

SEQ ID NO: 1713 - protein, 10 aa, synthetic construct
  REGION 1..10: note = source = /note="Description of Artificial Sequence: Synthetic peptide"
GFTFSSYAMS

SEQ ID NO: 1714 - protein, 10 aa, synthetic construct
  REGION 1..10: note = source = /note="Description of Artificial Sequence: Synthetic peptide"
GFTFSSYAMS

SEQ ID NO: 1715 - protein, 10 aa, synthetic construct
  REGION 1..10: note = source = /note="Description of Artificial Sequence: Synthetic peptide"
GYTFTNFGMN

SEQ ID NO: 1716 - protein, 10 aa, synthetic construct
  REGION 1..10: note = source = /note="Description of Artificial Sequence: Synthetic peptide"
GYTFTDYSIN

SEQ ID NO: 1717 - protein, 10 aa, synthetic construct
  REGION 1..10: note = source = /note="Description of Artificial Sequence: Synthetic peptide"
GYTFRHYSMN

SEQ ID NO: 1718 - protein, 10 aa, synthetic construct
  REGION 1..10: note = source = /note="Description of Artificial Sequence: Synthetic peptide"
GYTFTHYSMN

SEQ ID NO: 1719 - protein, 16 aa, synthetic construct
  REGION 1..16: note = source = /note="Description of Artificial Sequence: Synthetic peptide"
GIVYSGSTYYAASVKG

SEQ ID NO: 1720 - protein, 17 aa, synthetic construct
  REGION 1..17: note = source = /note="Description of Artificial Sequence: Synthetic peptide"
GISRSGENTYYADSVKG

SEQ ID NO: 1721 - protein, 17 aa, synthetic construct
  REGION 1..17: note = source = /note="Description of Artificial Sequence: Synthetic peptide"
GISWNSGSIGYADSVKG

SEQ ID NO: 1722 - protein, 16 aa, synthetic construct
  REGION 1..16: note = source = /note="Description of Artificial Sequence: Synthetic peptide"
GIVYSGSTYYAASVKG

SEQ ID NO: 1723 - protein, 17 aa, synthetic construct
  REGION 1..17: note = source = /note="Description of Artificial Sequence: Synthetic peptide"
WINPKNNNTNYAQKFQG

SEQ ID NO: 1724 - protein, 17 aa, synthetic construct
  REGION 1..17: note = source = /note="Description of Artificial Sequence: Synthetic peptide"
VISGSGGTTYYADSVKG

SEQ ID NO: 1725 - protein, 17 aa, synthetic construct
  REGION 1..17: note = source = /note="Description of Artificial Sequence: Synthetic peptide"
WISAYNGNTNYAQKFQG

SEQ ID NO: 1726 - protein, 16 aa, synthetic construct
  REGION 1..16: note = source = /note="Description of Artificial Sequence: Synthetic peptide"
GIVYSGSTYYAASVKG

SEQ ID NO: 1727 - protein, 16 aa, synthetic construct
  REGION 1..16: note = source = /note="Description of Artificial Sequence: Synthetic peptide"
GIVYSGSTYYAASVKG

SEQ ID NO: 1728 - protein, 16 aa, synthetic construct
  REGION 1..16: note = source = /note="Description of Artificial Sequence: Synthetic peptide"
GIVYSGSTYYAASVKG

SEQ ID NO: 1729 - protein, 17 aa, synthetic construct
  REGION 1..17: note = source = /note="Description of Artificial Sequence: Synthetic peptide"
YISSSGSTIYYADSVKG

SEQ ID NO: 1730 - protein, 17 aa, synthetic construct
  REGION 1..17: note = source = /note="Description of Artificial Sequence: Synthetic peptide"
YISSSGNTIYYADSVKG

SEQ ID NO: 1731 - protein, 16 aa, synthetic construct
  REGION 1..16: note = source = /note="Description of Artificial Sequence: Synthetic peptide"
GIVYSGSTYYAASVKG

SEQ ID NO: 1732 - protein, 16 aa, synthetic construct
  REGION 1..16: note = source = /note="Description of Artificial Sequence: Synthetic peptide"
GIVYSGSTYYAASVKG

SEQ ID NO: 1733 - protein, 16 aa, synthetic construct
  REGION 1..16: note = source = /note="Description of Artificial Sequence: Synthetic peptide"
GIVYSGSTYYAASVKG

SEQ ID NO: 1734 - protein, 16 aa, synthetic construct
  REGION 1..16: note = source = /note="Description of Artificial Sequence: Synthetic peptide"
SIYYSGSAYYNPSLKS

SEQ ID NO: 1735 - protein, 16 aa, synthetic construct
  REGION 1..16: note = source = /note="Description of Artificial Sequence: Synthetic peptide"
RIDWDEDKFYSTSLKT

SEQ ID NO: 1736 - protein, 17 aa, synthetic construct
  REGION 1..17: note = source = /note="Description of Artificial Sequence: Synthetic peptide"
SISSSSSYIYYADSVKG

SEQ ID NO: 1737 - protein, 17 aa, synthetic construct
  REGION 1..17: note = source = /note="Description of Artificial Sequence: Synthetic peptide"
YISSSGSTIYYADSVKG

SEQ ID NO: 1738 - protein, 17 aa, synthetic construct
  REGION 1..17: note = source = /note="Description of Artificial Sequence: Synthetic peptide"
MINPSGGVTAYSQTLQG

SEQ ID NO: 1739 - protein, 16 aa, synthetic construct
  REGION 1..16: note = source = /note="Description of Artificial Sequence: Synthetic peptide"
YIYYSGSTYYNPSLKS

SEQ ID NO: 1740 - protein, 17 aa, synthetic construct
  REGION 1..17: note = source = /note="Description of Artificial Sequence: Synthetic peptide"
GIIPIFGTANYAQKFQG

SEQ ID NO: 1741 - protein, 18 aa, synthetic construct
  REGION 1..18: note = source = /note="Description of Artificial Sequence: Synthetic peptide"
RTYYRSKWYSFYAISLKS

SEQ ID NO: 1742 - protein, 17 aa, synthetic construct
  REGION 1..17: note = source = /note="Description of Artificial Sequence: Synthetic peptide"
AISGSGGSTYYADSVKG

SEQ ID NO: 1743 - protein, 17 aa, synthetic construct
  REGION 1..17: note = source = /note="Description of Artificial Sequence: Synthetic peptide"
GISDSGVSTYYADSAKG

SEQ ID NO: 1744 - protein, 17 aa, synthetic construct
  REGION 1..17: note = source = /note="Description of Artificial Sequence: Synthetic peptide"
AISGSGGSTYYADSVKG

SEQ ID NO: 1745 - protein, 17 aa, synthetic construct
  REGION 1..17: note = source = /note="Description of Artificial Sequence: Synthetic peptide"
AISGSGGSTYYADSVKG

SEQ ID NO: 1746 - protein, 17 aa, synthetic construct
  REGION 1..17: note = source = /note="Description of Artificial Sequence: Synthetic peptide"
GISWNSGSIGYADSVKG

SEQ ID NO: 1747 - protein, 17 aa, synthetic construct
  REGION 1..17: note = source = /note="Description of Artificial Sequence: Synthetic peptide"
SINWKGNSLAYGDSVKG

SEQ ID NO: 1748 - protein, 17 aa, synthetic construct
  REGION 1..17: note = source = /note="Description of Artificial Sequence: Synthetic peptide"
AISGSGGSTYYADSVKG

SEQ ID NO: 1749 - protein, 17 aa, synthetic construct
  REGION 1..17: note = source = /note="Description of Artificial Sequence: Synthetic peptide"
AISGSGGSTYYADSVKG

SEQ ID NO: 1750 - protein, 17 aa, synthetic construct
  REGION 1..17: note = source = /note="Description of Artificial Sequence: Synthetic peptide"
AISGSGGSTYYADSVKG

SEQ ID NO: 1751 - protein, 17 aa, synthetic construct
  REGION 1..17: note = source = /note="Description of Artificial Sequence: Synthetic peptide"
AISGSGGSTYYADSVKG

SEQ ID NO: 1752 - protein, 17 aa, synthetic construct
  REGION 1..17: note = source = /note="Description of Artificial Sequence: Synthetic peptide"
AISGSGGSTYYADSVKG

SEQ ID NO: 1753 - protein, 17 aa, synthetic construct
  REGION 1..17: note = source = /note="Description of Artificial Sequence: Synthetic peptide"
AISGSGGSTYYADSVKG

SEQ ID NO: 1754 - protein, 17 aa, synthetic construct
  REGION 1..17: note = source = /note="Description of Artificial Sequence: Synthetic peptide"
AISGSGGSTYYADSVKG

SEQ ID NO: 1755 - protein, 17 aa, synthetic construct
  REGION 1..17: note = source = /note="Description of Artificial Sequence: Synthetic peptide"
WINTYTGESYFADDFKG

SEQ ID NO: 1756 - protein, 17 aa, synthetic construct
  REGION 1..17: note = source = /note="Description of Artificial Sequence: Synthetic peptide"
WINTETREPAYAYDFRG

SEQ ID NO: 1757 - protein, 17 aa, synthetic construct
  REGION 1..17: note = source = /note="Description of Artificial Sequence: Synthetic peptide"
RINTESGVPIYADDFKG

SEQ ID NO: 1758 - protein, 17 aa, synthetic construct
  REGION 1..17: note = source = /note="Description of Artificial Sequence: Synthetic peptide"
RINTETGEPLYADDFKG

SEQ ID NO: 1759 - protein, 7 aa, synthetic construct
  REGION 1..7: note = source = /note="Description of Artificial Sequence: Synthetic peptide"
HGGESDV

SEQ ID NO: 1760 - protein, 11 aa, synthetic construct
  REGION 1..11: note = source = /note="Description of Artificial Sequence: Synthetic peptide"
SPAHYYGGMDV

SEQ ID NO: 1761 - protein, 6 aa, synthetic construct
  REGION 1..6: note = source = /note="Description of Artificial Sequence: Synthetic peptide"
HSFLAY

SEQ ID NO: 1762 - protein, 7 aa, synthetic construct
  REGION 1..7: note = source = /note="Description of Artificial Sequence: Synthetic peptide"
HGGESDV

SEQ ID NO: 1763 - protein, 11 aa, synthetic construct
  REGION 1..11: note = source = /note="Description of Artificial Sequence: Synthetic peptide"
GPYYYQSYMDV

SEQ ID NO: 1764 - protein, 14 aa, synthetic construct
  REGION 1..14: note = source = /note="Description of Artificial Sequence: Synthetic peptide"
LDSSGYYYARGPRY

SEQ ID NO: 1765 - protein, 9 aa, synthetic construct
  REGION 1..9: note = source = /note="Description of Artificial Sequence: Synthetic peptide"
GPYYYYMDV

SEQ ID NO: 1766 - protein, 7 aa, synthetic construct
  REGION 1..7: note = source = /note="Description of Artificial Sequence: Synthetic peptide"
HGGESDV

SEQ ID NO: 1767 - protein, 7 aa, synthetic construct
  REGION 1..7: note = source = /note="Description of Artificial Sequence: Synthetic peptide"
HGGESDV

SEQ ID NO: 1768 - protein, 7 aa, synthetic construct
  REGION 1..7: note = source = /note="Description of Artificial Sequence: Synthetic peptide"
HGGESDV

SEQ ID NO: 1769 - protein, 8 aa, synthetic construct
  REGION 1..8: note = source = /note="Description of Artificial Sequence: Synthetic peptide"
ESGDGMDV

SEQ ID NO: 1770 - protein, 8 aa, synthetic construct
  REGION 1..8: note = source = /note="Description of Artificial Sequence: Synthetic peptide"
STMVREDY

SEQ ID NO: 1771 - protein, 7 aa, synthetic construct
  REGION 1..7: note = source = /note="Description of Artificial Sequence: Synthetic peptide"
HGGESDV

SEQ ID NO: 1772 - protein, 7 aa, synthetic construct
  REGION 1..7: note = source = /note="Description of Artificial Sequence: Synthetic peptide"
HGGESDV

SEQ ID NO: 1773 - protein, 7 aa, synthetic construct
  REGION 1..7: note = source = /note="Description of Artificial Sequence: Synthetic peptide"
HGGESDV

SEQ ID NO: 1774 - protein, 11 aa, synthetic construct
  REGION 1..11: note = source = /note="Description of Artificial Sequence: Synthetic peptide"
HWQEWPDAFDI

SEQ ID NO: 1775 - protein, 13 aa, synthetic construct
  REGION 1..13: note = source = /note="Description of Artificial Sequence: Synthetic peptide"
SGAGGTSATAFDI

SEQ ID NO: 1776 - protein, 10 aa, synthetic construct
  REGION 1..10: note = source = /note="Description of Artificial Sequence: Synthetic peptide"
TIAAVYAFDI

SEQ ID NO: 1777 - protein, 8 aa, synthetic construct
  REGION 1..8: note = source = /note="Description of Artificial Sequence: Synthetic peptide"
DLRGAFDI

SEQ ID NO: 1778 - protein, 11 aa, synthetic construct
  REGION 1..11: note = source = /note="Description of Artificial Sequence: Synthetic peptide"
EGSGSGWYFDF

SEQ ID NO: 1779 - protein, 13 aa, synthetic construct
  REGION 1..13: note = source = /note="Description of Artificial Sequence: Synthetic peptide"
AGIAARLRGAFDI

SEQ ID NO: 1780 - protein, 20 aa, synthetic construct
  REGION 1..20: note = source = /note="Description of Artificial Sequence: Synthetic peptide"
RGGYQLLRWDVGLLRSAFDI

SEQ ID NO: 1781 - protein, 13 aa, synthetic construct
  REGION 1..13: note = source = /note="Description of Artificial Sequence: Synthetic peptide"
SSPEGLFLYWFDP

SEQ ID NO: 1782 - protein, 9 aa, synthetic construct
  REGION 1..9: note = source = /note="Description of Artificial Sequence: Synthetic peptide"
VEGSGSLDY

SEQ ID NO: 1783 - protein, 9 aa, synthetic construct
  REGION 1..9: note = source = /note="Description of Artificial Sequence: Synthetic peptide"
RAGSEASDI

SEQ ID NO: 1784 - protein, 15 aa, synthetic construct
  REGION 1..15: note = source = /note="Description of Artificial Sequence: Synthetic peptide"
ATYKRELRYYYGMDV

SEQ ID NO: 1785 - protein, 15 aa, synthetic construct
  REGION 1..15: note = source = /note="Description of Artificial Sequence: Synthetic peptide"
ATYKRELRYYYGMDV

SEQ ID NO: 1786 - protein, 8 aa, synthetic construct
  REGION 1..8: note = source = /note="Description of Artificial Sequence: Synthetic peptide"
VGKAVPDV

SEQ ID NO: 1787 - protein, 13 aa, synthetic construct
  REGION 1..13: note = source = /note="Description of Artificial Sequence: Synthetic peptide"
HQGVAYYNYAMDV

SEQ ID NO: 1788 - protein, 8 aa, synthetic construct
  REGION 1..8: note = source = /note="Description of Artificial Sequence: Synthetic peptide"
VVRDGMDV

SEQ ID NO: 1789 - protein, 9 aa, synthetic construct
  REGION 1..9: note = source = /note="Description of Artificial Sequence: Synthetic peptide"
IPQTGTFDY

SEQ ID NO: 1790 - protein, 15 aa, synthetic construct
  REGION 1..15: note = source = /note="Description of Artificial Sequence: Synthetic peptide"
ANYKRELRYYYGMDV

SEQ ID NO: 1791 - protein, 11 aa, synthetic construct
  REGION 1..11: note = source = /note="Description of Artificial Sequence: Synthetic peptide"
ALVGATGAFDI

SEQ ID NO: 1792 - protein, 8 aa, synthetic construct
  REGION 1..8: note = source = /note="Description of Artificial Sequence: Synthetic peptide"
WFGEGFDP

SEQ ID NO: 1793 - protein, 17 aa, synthetic construct
  REGION 1..17: note = source = /note="Description of Artificial Sequence: Synthetic peptide"
VGYDSSGYYRDYYGMDV

SEQ ID NO: 1794 - protein, 13 aa, synthetic construct
  REGION 1..13: note = source = /note="Description of Artificial Sequence: Synthetic peptide"
MGWSSGYLGAFDI

SEQ ID NO: 1795 - protein, 13 aa, synthetic construct
  REGION 1..13: note = source = /note="Description of Artificial Sequence: Synthetic peptide"
GEIYYGYDGGFAY

SEQ ID NO: 1796 - protein, 8 aa, synthetic construct
  REGION 1..8: note = source = /note="Description of Artificial Sequence: Synthetic peptide"
DYSYAMDY

SEQ ID NO: 1797 - protein, 8 aa, synthetic construct
  REGION 1..8: note = source = /note="Description of Artificial Sequence: Synthetic peptide"
DYLYSLDF

SEQ ID NO: 1798 - protein, 8 aa, synthetic construct
  REGION 1..8: note = source = /note="Description of Artificial Sequence: Synthetic peptide"
DYLYSCDY

SEQ ID NO: 1799 - protein, 11 aa, synthetic construct
  REGION 1..11: note = source = /note="Description of Artificial Sequence: Synthetic peptide"
RASQSISSYLN

SEQ ID NO: 1800 - protein, 12 aa, synthetic construct
  REGION 1..12: note = source = /note="Description of Artificial Sequence: Synthetic peptide"
RASQSISSSFLA

SEQ ID NO: 1801 - protein, 16 aa, synthetic construct
  REGION 1..16: note = source = /note="Description of Artificial Sequence: Synthetic peptide"
RSSQSLLHSNGYNYLD

SEQ ID NO: 1802 - protein, 16 aa, synthetic construct
  REGION 1..16: note = source = /note="Description of Artificial Sequence: Synthetic peptide"
KSSQSLLRNDGKTPLY

SEQ ID NO: 1803 - protein, 16 aa, synthetic construct
  REGION 1..16: note = source = /note="Description of Artificial Sequence: Synthetic peptide"
RSSQSLLHSNGYNYLN

SEQ ID NO: 1804 - protein, 11 aa, synthetic construct
  REGION 1..11: note = source = /note="Description of Artificial Sequence: Synthetic peptide"
RASQSISSYLN

SEQ ID NO: 1805 - protein, 16 aa, synthetic construct
  REGION 1..16: note = source = /note="Description of Artificial Sequence: Synthetic peptide"
RSSQSLLYSNGYNYVD

SEQ ID NO: 1806 - protein, 11 aa, synthetic construct
  REGION 1..11: note = source = /note="Description of Artificial Sequence: Synthetic peptide"
RASQSVSSNLA

SEQ ID NO: 1807 - protein, 11 aa, synthetic construct
  REGION 1..11: note = source = /note="Description of Artificial Sequence: Synthetic peptide"
RASQSVSSKLA

SEQ ID NO: 1808 - protein, 12 aa, synthetic construct
  REGION 1..12: note = source = /note="Description of Artificial Sequence: Synthetic peptide"
RASQSVGSTNLA

SEQ ID NO: 1809 - protein, 11 aa, synthetic construct
  REGION 1..11: note = source = /note="Description of Artificial Sequence: Synthetic peptide"
RASQSISSYLN

SEQ ID NO: 1810 - protein, 16 aa, synthetic construct
  REGION 1..16: note = source = /note="Description of Artificial Sequence: Synthetic peptide"
KSSESLVHNSGKTYLN

SEQ ID NO: 1811 - protein, 11 aa, synthetic construct
  REGION 1..11: note = source = /note="Description of Artificial Sequence: Synthetic peptide"
QASEDINKFLN

SEQ ID NO: 1812 - protein, 11 aa, synthetic construct
  REGION 1..11: note = source = /note="Description of Artificial Sequence: Synthetic peptide"
RASQSVGSNLA

SEQ ID NO: 1813 - protein, 12 aa, synthetic construct
  REGION 1..12: note = source = /note="Description of Artificial Sequence: Synthetic peptide"
RASQSIGSSSLA

SEQ ID NO: 1814 - protein, 11 aa, synthetic construct
  REGION 1..11: note = source = /note="Description of Artificial Sequence: Synthetic peptide"
KASQDIDDAMN

SEQ ID NO: 1815 - protein, 11 aa, synthetic construct
  REGION 1..11: note = source = /note="Description of Artificial Sequence: Synthetic peptide"
RASQDIYNNLA

SEQ ID NO: 1816 - protein, 16 aa, synthetic construct
  REGION 1..16: note = source = /note="Description of Artificial Sequence: Synthetic peptide"
RSSQSLLHSNGYNYLD

SEQ ID NO: 1817 - protein, 11 aa, synthetic construct
  REGION 1..11: note = source = /note="Description of Artificial Sequence: Synthetic peptide"
GGNNIGTKSVH

SEQ ID NO: 1818 - protein, 11 aa, synthetic construct
  REGION 1..11: note = source = /note="Description of Artificial Sequence: Synthetic peptide"
SGDGLSKKYVS

SEQ ID NO: 1819 - protein, 11 aa, synthetic construct
  REGION 1..11: note = source = /note="Description of Artificial Sequence: Synthetic peptide"
RASQGIRNWLA

SEQ ID NO: 1820 - protein, 11 aa, synthetic construct
  REGION 1..11: note = source = /note="Description of Artificial Sequence: Synthetic peptide"
GGNNIGSKSVH

SEQ ID NO: 1821 - protein, 11 aa, synthetic construct
  REGION 1..11: note = source = /note="Description of Artificial Sequence: Synthetic peptide"
QGDSLGNYYAT

SEQ ID NO: 1822 - protein, 12 aa, synthetic construct
  REGION 1..12: note = source = /note="Description of Artificial Sequence: Synthetic peptide"
RASQSVSSAYLA

SEQ ID NO: 1823 - protein, 11 aa, synthetic construct
  REGION 1..11: note = source = /note="Description of Artificial Sequence: Synthetic peptide"
RASQSVSNSLA

SEQ ID NO: 1824 - protein, 12 aa, synthetic construct
  REGION 1..12: note = source = /note="Description of Artificial Sequence: Synthetic peptide"
RASQSVSSSFLA

SEQ ID NO: 1825 - protein, 12 aa, synthetic construct
  REGION 1..12: note = source = /note="Description of Artificial Sequence: Synthetic peptide"
RASQSVSTTFLA

SEQ ID NO: 1826 - protein, 11 aa, synthetic construct
  REGION 1..11: note = source = /note="Description of Artificial Sequence: Synthetic peptide"
RASQSISSYLN

SEQ ID NO: 1827 - protein, 12 aa, synthetic construct
  REGION 1..12: note = source = /note="Description of Artificial Sequence: Synthetic peptide"
RATQSIGSSFLA

SEQ ID NO: 1828 - protein, 12 aa, synthetic construct
  REGION 1..12: note = source = /note="Description of Artificial Sequence: Synthetic peptide"
RASQSVSSSYLA

SEQ ID NO: 1829 - protein, 12 aa, synthetic construct
  REGION 1..12: note = source = /note="Description of Artificial Sequence: Synthetic peptide"
RASQSVSSSYLA

SEQ ID NO: 1830 - protein, 12 aa, synthetic construct
  REGION 1..12: note = source = /note="Description of Artificial Sequence: Synthetic peptide"
RASQRVASNYLA

SEQ ID NO: 1831 - protein, 12 aa, synthetic construct
  REGION 1..12: note = source = /note="Description of Artificial Sequence: Synthetic peptide"
RASQSLSSNFLA

SEQ ID NO: 1832 - protein, 16 aa, synthetic construct
  REGION 1..16: note = source = /note="Description of Artificial Sequence: Synthetic peptide"
RSSQSLLHSNGYNYLD

SEQ ID NO: 1833 - protein, 12 aa, synthetic construct
  REGION 1..12: note = source = /note="Description of Artificial Sequence: Synthetic peptide"
RASQSVSSSYLA

SEQ ID NO: 1834 - protein, 12 aa, synthetic construct
  REGION 1..12: note = source = /note="Description of Artificial Sequence: Synthetic peptide"
RASQSVASSFLA

SEQ ID NO: 1835 - protein, 11 aa, synthetic construct
  REGION 1..11: note = source = /note="Description of Artificial Sequence: Synthetic peptide"
RASQDVNTAVS

SEQ ID NO: 1836 - protein, 15 aa, synthetic construct
  REGION 1..15: note = source = /note="Description of Artificial Sequence: Synthetic peptide"
RASESVSVIGAHLIH

SEQ ID NO: 1837 - protein, 15 aa, synthetic construct
  REGION 1..15: note = source = /note="Description of Artificial Sequence: Synthetic peptide"
RASESVTILGSHLIY

SEQ ID NO: 1838 - protein, 15 aa, synthetic construct
  REGION 1..15: note = source = /note="Description of Artificial Sequence: Synthetic peptide"
RASESVTILGSHLIY

SEQ ID NO: 1839 - protein, 7 aa, synthetic construct
  REGION 1..7: note = source = /note="Description of Artificial Sequence: Synthetic peptide"
AASSLQS

SEQ ID NO: 1840 - protein, 7 aa, synthetic construct
  REGION 1..7: note = source = /note="Description of Artificial Sequence: Synthetic peptide"
GASRRAT

SEQ ID NO: 1841 - protein, 7 aa, synthetic construct
  REGION 1..7: note = source = /note="Description of Artificial Sequence: Synthetic peptide"
LGSNRAS

SEQ ID NO: 1842 - protein, 7 aa, synthetic construct
  REGION 1..7: note = source = /note="Description of Artificial Sequence: Synthetic peptide"
EVSNRFS

SEQ ID NO: 1843 - protein, 7 aa, synthetic construct
  REGION 1..7: note = source = /note="Description of Artificial Sequence: Synthetic peptide"
LGSKRAS

SEQ ID NO: 1844 - protein, 7 aa, synthetic construct
  REGION 1..7: note = source = /note="Description of Artificial Sequence: Synthetic peptide"
GASTLAS

SEQ ID NO: 1845 - protein, 7 aa, synthetic construct
  REGION 1..7: note = source = /note="Description of Artificial Sequence: Synthetic peptide"
LGSNRAS

SEQ ID NO: 1846 - protein, 7 aa, synthetic construct
  REGION 1..7: note = source = /note="Description of Artificial Sequence: Synthetic peptide"
GASTRAS

SEQ ID NO: 1847 - protein, 7 aa, synthetic construct
  REGION 1..7: note = source = /note="Description of Artificial Sequence: Synthetic peptide"
GASIRAT

SEQ ID NO: 1848 - protein, 7 aa, synthetic construct
  REGION 1..7: note = source = /note="Description of Artificial Sequence: Synthetic peptide"
DASNRAT

SEQ ID NO: 1849 - protein, 7 aa, synthetic construct
  REGION 1..7: note = source = /note="Description of Artificial Sequence: Synthetic peptide"
AASSLQS

SEQ ID NO: 1850 - protein, 7 aa, synthetic construct
  REGION 1..7: note = source = /note="Description of Artificial Sequence: Synthetic peptide"
EVSNRDS

SEQ ID NO: 1851 - protein, 7 aa, synthetic construct
  REGION 1..7: note = source = /note="Description of Artificial Sequence: Synthetic peptide"
DASTLQT

SEQ ID NO: 1852 - protein, 7 aa, synthetic construct
  REGION 1..7: note = source = /note="Description of Artificial Sequence: Synthetic peptide"
GASTRAT

SEQ ID NO: 1853 - protein, 7 aa, synthetic construct
  REGION 1..7: note = source = /note="Description of Artificial Sequence: Synthetic peptide"
GASSRAS

SEQ ID NO: 1854 - protein, 7 aa, synthetic construct
  REGION 1..7: note = source = /note="Description of Artificial Sequence: Synthetic peptide"
SATSPVP

SEQ ID NO: 1855 - protein, 7 aa, synthetic construct
  REGION 1..7: note = source = /note="Description of Artificial Sequence: Synthetic peptide"
AANKSQS

SEQ ID NO: 1856 - protein, 7 aa, synthetic construct
  REGION 1..7: note = source = /note="Description of Artificial Sequence: Synthetic peptide"
LGSNRAS

SEQ ID NO: 1857 - protein, 7 aa, synthetic construct
  REGION 1..7: note = source = /note="Description of Artificial Sequence: Synthetic peptide"
DDSVRPS

SEQ ID NO: 1858 - protein, 7 aa, synthetic construct
  REGION 1..7: note = source = /note="Description of Artificial Sequence: Synthetic peptide"
RDKERPS

SEQ ID NO: 1859 - protein, 7 aa, synthetic construct
  REGION 1..7: note = source = /note="Description of Artificial Sequence: Synthetic peptide"
AASNLQS

SEQ ID NO: 1860 - protein, 7 aa, synthetic construct
  REGION 1..7: note = source = /note="Description of Artificial Sequence: Synthetic peptide"
GKNNRPS

SEQ ID NO: 1861 - protein, 7 aa, synthetic construct
  REGION 1..7: note = source = /note="Description of Artificial Sequence: Synthetic peptide"
GTNNRPS

SEQ ID NO: 1862 - protein, 7 aa, synthetic construct
  REGION 1..7: note = source = /note="Description of Artificial Sequence: Synthetic peptide"
GASTRAT

SEQ ID NO: 1863 - protein, 7 aa, synthetic construct
  REGION 1..7: note = source = /note="Description of Artificial Sequence: Synthetic peptide"
DASSRAT

SEQ ID NO: 1864 - protein, 7 aa, synthetic construct
  REGION 1..7: note = source = /note="Description of Artificial Sequence: Synthetic peptide"
GASSRAT

SEQ ID NO: 1865 - protein, 7 aa, synthetic construct
  REGION 1..7: note = source = /note="Description of Artificial Sequence: Synthetic peptide"
GSSNRAT

SEQ ID NO: 1866 - protein, 7 aa, synthetic construct
  REGION 1..7: note = source = /note="Description of Artificial Sequence: Synthetic peptide"
AASSLQS

SEQ ID NO: 1867 - protein, 7 aa, synthetic construct
  REGION 1..7: note = source = /note="Description of Artificial Sequence: Synthetic peptide"
GASQRAT

SEQ ID NO: 1868 - protein, 7 aa, synthetic construct
  REGION 1..7: note = source = /note="Description of Artificial Sequence: Synthetic peptide"
GASSRAT

SEQ ID NO: 1869 - protein, 7 aa, synthetic construct
  REGION 1..7: note = source = /note="Description of Artificial Sequence: Synthetic peptide"
GASSRAT

SEQ ID NO: 1870 - protein, 7 aa, synthetic construct
  REGION 1..7: note = source = /note="Description of Artificial Sequence: Synthetic peptide"
GASSRAT

SEQ ID NO: 1871 - protein, 7 aa, synthetic construct
  REGION 1..7: note = source = /note="Description of Artificial Sequence: Synthetic peptide"
GASNWAT

SEQ ID NO: 1872 - protein, 7 aa, synthetic construct
  REGION 1..7: note = source = /note="Description of Artificial Sequence: Synthetic peptide"
LGSNRAS

SEQ ID NO: 1873 - protein, 7 aa, synthetic construct
  REGION 1..7: note = source = /note="Description of Artificial Sequence: Synthetic peptide"
GTSSRAT

SEQ ID NO: 1874 - protein, 7 aa, synthetic construct
  REGION 1..7: note = source = /note="Description of Artificial Sequence: Synthetic peptide"
GASGRAT

SEQ ID NO: 1875 - protein, 7 aa, synthetic construct
  REGION 1..7: note = source = /note="Description of Artificial Sequence: Synthetic peptide"
SASYRYT

SEQ ID NO: 1876 - protein, 7 aa, synthetic construct
  REGION 1..7: note = source = /note="Description of Artificial Sequence: Synthetic peptide"
LASNLET

SEQ ID NO: 1877 - protein, 7 aa, synthetic construct
  REGION 1..7: note = source = /note="Description of Artificial Sequence: Synthetic peptide"
LASNVQT

SEQ ID NO: 1878 - protein, 7 aa, synthetic construct
  REGION 1..7: note = source = /note="Description of Artificial Sequence: Synthetic peptide"
LASNVQT

SEQ ID NO: 1879 - protein, 9 aa, synthetic construct
  REGION 1..9: note = source = /note="Description of Artificial Sequence: Synthetic peptide"
QQSYSTPYT

SEQ ID NO: 1880 - protein, 10 aa, synthetic construct
  REGION 1..10: note = source = /note="Description of Artificial Sequence: Synthetic peptide"
QQYHSSPSWT

SEQ ID NO: 1881 - protein, 9 aa, synthetic construct
  REGION 1..9: note = source = /note="Description of Artificial Sequence: Synthetic peptide"
MQALQTPYT

SEQ ID NO: 1882 - protein, 8 aa, synthetic construct
  REGION 1..8: note = source = /note="Description of Artificial Sequence: Synthetic peptide"
MQNIQFPS

SEQ ID NO: 1883 - protein, 9 aa, synthetic construct
  REGION 1..9: note = source = /note="Description of Artificial Sequence: Synthetic peptide"
MQALQTPYT

SEQ ID NO: 1884 - protein, 8 aa, synthetic construct
  REGION 1..8: note = source = /note="Description of Artificial Sequence: Synthetic peptide"
QQSYKRAS

SEQ ID NO: 1885 - protein, 9 aa, synthetic construct
  REGION 1..9: note = source = /note="Description of Artificial Sequence: Synthetic peptide"
MQGRQFPYS

SEQ ID NO: 1886 - protein, 8 aa, synthetic construct
  REGION 1..8: note = source = /note="Description of Artificial Sequence: Synthetic peptide"
QQYGSSLT

SEQ ID NO: 1887 - protein, 9 aa, synthetic construct
  REGION 1..9: note = source = /note="Description of Artificial Sequence: Synthetic peptide"
QQYGSSSWT

SEQ ID NO: 1888 - protein, 10 aa, synthetic construct
  REGION 1..10: note = source = /note="Description of Artificial Sequence: Synthetic peptide"
QQYGSSPPWT

SEQ ID NO: 1889 - protein, 7 aa, synthetic construct
  REGION 1..7: note = source = /note="Description of Artificial Sequence: Synthetic peptide"
QQSYTLA

SEQ ID NO: 1890 - protein, 9 aa, synthetic construct
  REGION 1..9: note = source = /note="Description of Artificial Sequence: Synthetic peptide"
MQGTHWPGT

SEQ ID NO: 1891 - protein, 9 aa, synthetic construct
  REGION 1..9: note = source = /note="Description of Artificial Sequence: Synthetic peptide"
QQYESLPLT

SEQ ID NO: 1892 - protein, 10 aa, synthetic construct
  REGION 1..10: note = source = /note="Description of Artificial Sequence: Synthetic peptide"
QQYNDWLPVT

SEQ ID NO: 1893 - protein, 10 aa, synthetic construct
  REGION 1..10: note = source = /note="Description of Artificial Sequence: Synthetic peptide"
QQYAGSPPFT

SEQ ID NO: 1894 - protein, 9 aa, synthetic construct
  REGION 1..9: note = source = /note="Description of Artificial Sequence: Synthetic peptide"
LQHDNFPLT

SEQ ID NO: 1895 - protein, 9 aa, synthetic construct
  REGION 1..9: note = source = /note="Description of Artificial Sequence: Synthetic peptide"
QHYYRFPYS

SEQ ID NO: 1896 - protein, 9 aa, synthetic construct
  REGION 1..9: note = source = /note="Description of Artificial Sequence: Synthetic peptide"
MQALQTPYT

SEQ ID NO: 1897 - protein, 11 aa, synthetic construct
  REGION 1..11: note = source = /note="Description of Artificial Sequence: Synthetic peptide"
QVWDSDSEHVV

SEQ ID NO: 1898 - protein, 9 aa, synthetic construct
  REGION 1..9: note = source = /note="Description of Artificial Sequence: Synthetic peptide"
QAWDDTTVV

SEQ ID NO: 1899 - protein, 9 aa, synthetic construct
  REGION 1..9: note = source = /note="Description of Artificial Sequence: Synthetic peptide"
QKYNSAPFT

SEQ ID NO: 1900 - protein, 12 aa, synthetic construct
  REGION 1..12: note = source = /note="Description of Artificial Sequence: Synthetic peptide"
SSRDSSGDHLRV

SEQ ID NO: 1901 - protein, 11 aa, synthetic construct
  REGION 1..11: note = source = /note="Description of Artificial Sequence: Synthetic peptide"
NSRDSSGHHLL

SEQ ID NO: 1902 - protein, 14 aa, synthetic construct
  REGION 1..14: note = source = /note="Description of Artificial Sequence: Synthetic peptide"
QHYGSSFNGSSLFT

SEQ ID NO: 1903 - protein, 10 aa, synthetic construct
  REGION 1..10: note = source = /note="Description of Artificial Sequence: Synthetic peptide"
QQFGTSSGLT

SEQ ID NO: 1904 - protein, 10 aa, synthetic construct
  REGION 1..10: note = source = /note="Description of Artificial Sequence: Synthetic peptide"
QQYHSSPSWT

SEQ ID NO: 1905 - protein, 10 aa, synthetic construct
  REGION 1..10: note = source = /note="Description of Artificial Sequence: Synthetic peptide"
QQYHSSPSWT

SEQ ID NO: 1906 - protein, 9 aa, synthetic construct
  REGION 1..9: note = source = /note="Description of Artificial Sequence: Synthetic peptide"
QQSYSTPYS

SEQ ID NO: 1907 - protein, 10 aa, synthetic construct
  REGION 1..10: note = source = /note="Description of Artificial Sequence: Synthetic peptide"
QHYESSPSWT

SEQ ID NO: 1908 - protein, 10 aa, synthetic construct
  REGION 1..10: note = source = /note="Description of Artificial Sequence: Synthetic peptide"
QQYGSPPRFT

SEQ ID NO: 1909 - protein, 10 aa, synthetic construct
  REGION 1..10: note = source = /note="Description of Artificial Sequence: Synthetic peptide"
QHYGSSPSWT

SEQ ID NO: 1910 - protein, 10 aa, synthetic construct
  REGION 1..10: note = source = /note="Description of Artificial Sequence: Synthetic peptide"
QHYDSSPSWT

SEQ ID NO: 1911 - protein, 10 aa, synthetic construct
  REGION 1..10: note = source = /note="Description of Artificial Sequence: Synthetic peptide"
QYYGTSPMYT

SEQ ID NO: 1912 - protein, 9 aa, synthetic construct
  REGION 1..9: note = source = /note="Description of Artificial Sequence: Synthetic peptide"
MQALQTPLT

SEQ ID NO: 1913 - protein, 11 aa, synthetic construct
  REGION 1..11: note = source = /note="Description of Artificial Sequence: Synthetic peptide"
QHYGNSPPKFT

SEQ ID NO: 1914 - protein, 10 aa, synthetic construct
  REGION 1..10: note = source = /note="Description of Artificial Sequence: Synthetic peptide"
QHYGGSPRLT

SEQ ID NO: 1915 - protein, 9 aa, synthetic construct
  REGION 1..9: note = source = /note="Description of Artificial Sequence: Synthetic peptide"
QQHYSTPWT

SEQ ID NO: 1916 - protein, 9 aa, synthetic construct
  REGION 1..9: note = source = /note="Description of Artificial Sequence: Synthetic peptide"
LQSRIFPRT

SEQ ID NO: 1917 - protein, 9 aa, synthetic construct
  REGION 1..9: note = source = /note="Description of Artificial Sequence: Synthetic peptide"
LQSRTIPRT

SEQ ID NO: 1918 - protein, 9 aa, synthetic construct
  REGION 1..9: note = source = /note="Description of Artificial Sequence: Synthetic peptide"
LQSRTIPRT

SEQ ID NO: 1919 - protein, 21 aa, synthetic construct
  REGION 1..21: note = source = /note="Description of Artificial Sequence: Synthetic peptide"
MALPVTALLLPLALLLHAARP

SEQ ID NO: 1920 - DNA, 63 bp, synthetic construct; identical to SEQ ID NO: 402
  misc_feature 1..63: note = source = /note="Description of Artificial Sequence: Synthetic oligonucleotide"
  source 1..63: mol_type = other DNA

SEQ ID NO: 1921 - protein, 45 aa, synthetic construct; identical to SEQ ID NO: 403
  REGION 1..45: note = source = /note="Description of Artificial Sequence: Synthetic polypeptide"

SEQ ID NO: 1922 - DNA, 135 bp, synthetic construct; identical to SEQ ID NO: 404
  misc_feature 1..135: note = source = /note="Description of Artificial Sequence: Synthetic polynucleotide"
  source 1..135: mol_type = other DNA

SEQ ID NO: 1923 - protein, 24 aa, synthetic construct
  REGION 1..24: note = source = /note="Description of Artificial Sequence: Synthetic peptide"
IYIWAPLAGTCGVLLLSLVITLYC

SEQ ID NO: 1924 - DNA, 72 bp, synthetic construct; identical to SEQ ID NO: 13
  misc_feature 1..72: note = source = /note="Description of Artificial Sequence: Synthetic oligonucleotide"
  source 1..72: mol_type = other DNA

SEQ ID NO: 1925 - protein, 42 aa, synthetic construct; identical to SEQ ID NO: 14
  REGION 1..42: note = source = /note="Description of Artificial Sequence: Synthetic polypeptide"

SEQ ID NO: 1926 - DNA, 126 bp, synthetic construct; identical to SEQ ID NO: 15
  misc_feature 1..126: note = source = /note="Description of Artificial Sequence: Synthetic polynucleotide"
  source 1..126: mol_type = other DNA

SEQ ID NO: 1927 - protein, 41 aa, synthetic construct
  REGION 1..41: note = source = /note="Description of Artificial Sequence: Synthetic polypeptide"
RSKRSRLLHSDYMNMTPRRPGPTRKHYQPYAPPRDFAAYRS

SEQ ID NO: 1928 - DNA, 123 bp, synthetic construct; identical to SEQ ID NO: 17
  misc_feature 1..123: note = source = /note="Description of Artificial Sequence: Synthetic polynucleotide"
  source 1..123: mol_type = other DNA

SEQ ID NO: 1929 - protein, 35 aa, synthetic construct
  REGION 1..35: note = source = /note="Description of Artificial Sequence: Synthetic polypeptide"
TKKKYSSSVHDPNGEYMFMRAVNTAKKSRLTDVTL

SEQ ID NO: 1930 - DNA, 105 bp, synthetic construct
  misc_feature 1..105: note = source = /note="Description of Artificial Sequence: Synthetic polynucleotide"
  source 1..105: mol_type = other DNA
acaaaaaagaagtattcatccagtgtgcacgaccctaacggtgaatacatgttcatgagagcagtgaacacagccaaaaaatccagactcacagatgtgacccta

SEQ ID NO: 1931 - protein, 112 aa, synthetic construct; identical to SEQ ID NO: 18
  REGION 1..112: note = source = /note="Description of Artificial Sequence: Synthetic polypeptide"

SEQ ID NO: 1932 - DNA, 336 bp, synthetic construct; identical to SEQ ID NO: 19
  misc_feature 1..336: note = source = /note="Description of Artificial Sequence: Synthetic polynucleotide"
  source 1..336: mol_type = other DNA

SEQ ID NO: 1933 - protein, 112 aa, Homo sapiens; identical to SEQ ID NO: 20

SEQ ID NO: 1934 - DNA, 336 bp, Homo sapiens; identical to SEQ ID NO: 21
  source 1..336: mol_type = other DNA

SEQ ID NO: 1935 - protein, 230 aa, synthetic construct; identical to SEQ ID NO: 405
  REGION 1..230: note = source = /note="Description of Artificial Sequence: Synthetic polypeptide"

SEQ ID NO: 1936 - DNA, 690 bp, synthetic construct; identical to SEQ ID NO: 406
  misc_feature 1..690: note = source = /note="Description of Artificial Sequence: Synthetic polynucleotide"
  source 1..690: mol_type = other DNA

SEQ ID NO: 1937-1999 - skipped (63 entries)

SEQ ID NO: 2000 - DNA, 63 bp, synthetic construct
  misc_feature 1..63: note = source = /note="Description of Artificial Sequence: Synthetic oligonucleotide"
  source 1..63: mol_type = other DNA
atggccctccctgtcaccgccctgctgcttccgctggctcttctgctccacgccgctcggccc

SEQ ID NO: 2001 - DNA, 72 bp, synthetic construct
  misc_feature 1..72: note = source = /note="Description of Artificial Sequence: Synthetic oligonucleotide"
  source 1..72: mol_type = other DNA
atctacatttgggcccctctggctggtacttgcggggtcctgctgctttcactcgtgatcactctttactgt

SEQ ID NO: 2002 - DNA, 126 bp, synthetic construct
  misc_feature 1..126: note = source = /note="Description of Artificial Sequence: Synthetic polynucleotide"
  source 1..126: mol_type = other DNA
aagcgcggtcggaagaagctgctgtacatctttaagcaacccttcatgaggcctgtgcagactactcaagaggaggacggctgttcatgccggttcccagaggaggaggaaggcggctgcgaactg

SEQ ID NO: 2003 - DNA, 336 bp, synthetic construct
  misc_feature 1..336: note = source = /note="Description of Artificial Sequence: Synthetic polynucleotide"
  source 1..336: mol_type = other DNA
cgcgtgaaattcagccgcagcgcagatgctccagcctacaagcaggggcagaaccagctctacaacgaactcaatcttggtcggagagaggagtacgacgtgctggacaagcggagaggacgggacccagaaatgggcgggaagccgcgcagaaagaatccccaagagggcctgtacaacgagctccaaaaggataagatggcagaagcctatagcgagattggtatgaaaggggaacgcagaagaggcaaaggccacgacggactgtaccagggactcagcaccgccaccaaggacacctatgacgctcttcacatgcaggccctgccgcctcgg

SEQ ID NO: 2004 - skipped

SEQ ID NO: 2005 - protein, 8 aa, synthetic construct
  REGION 1..8: note = source = /note="Description of Artificial Sequence: Synthetic peptide"
GFDFSRYW

SEQ ID NO: 2006 - protein, 8 aa, synthetic construct
  REGION 1..8: note = source = /note="Description of Artificial Sequence: Synthetic peptide"
INLDSSTI

SEQ ID NO: 2007 - protein, 9 aa, synthetic construct
  REGION 1..9: note = source = /note="Description of Artificial Sequence: Synthetic peptide"
ARRYDAMDY

SEQ ID NO: 2008 - protein, 10 aa, synthetic construct
  REGION 1..10: note = source = /note="Description of Artificial Sequence: Synthetic peptide"
ESVDDYGISF

SEQ ID NO: 2009 - skipped

SEQ ID NO: 2010 - protein, 5 aa, synthetic construct
  REGION 1..5: note = source = /note="Description of Artificial Sequence: Synthetic peptide"
QQSKD

SEQ ID NO: 2011 - protein, 153 aa, synthetic construct
  REGION 1..153: note = source = /note="Description of Artificial Sequence: Synthetic polypeptide"
LKPREVKLVESGGGLVQPGGSLKLSCAASGFDFSRYWMSWVRQAPGKGLEWIGEINLDSSTINYTPSLKDKFIISRDNAKNTLYLQMSKVRSEDTALYYCARRYDAMDYWGQGTSVTVSSAKTTAPSVYPLAPVCGDTTGSSVTLGCLVKASQ

SEQ ID NO: 2012 - protein, 111 aa, synthetic construct
  REGION 1..111: note = source = /note="Description of Artificial Sequence: Synthetic polypeptide"
ASDIVLTQSPASLAVSLGQRATISCRASESVDDYGISFMNWFQQKPGQPPKLLIYAAPNQGSGVPARFSGSGSGTDFSLNIHPMEEDDTAMYFCQQSKDVRWRHQAGDQTG

SEQ ID NO: 2013-2019 - skipped (7 entries)

SEQ ID NO: 2020 - protein, 244 aa, synthetic construct
  REGION 1..244: note = source = /note="Description of Artificial Sequence: Synthetic polypeptide"
QVQLLESGAELVRPGSSVKISCKASGYAFSSYWMNWVKQRPGQGLEWIGQIYPGDGDTNYNGKFKGQATLTADKSSSTAYMQLSGLTSEDSAVYSCARKTISSVVDFYFDYWGQGTTVTGGGSGGGSGGGSGGGSELVLTQSPKFMSTSVGDRVSVTCKASQNVGTNVAWYQQKPGQSPKPLIYSATYRNSGVPDRFTGSGSGTDFTLTITNVQSKDLADYFCQYNRYPYTSFFFTKLEIKRRS

SEQ ID NO: 2021 - protein, 246 aa, synthetic construct
  REGION 1..246: note = source = /note="Description of Artificial Sequence: Synthetic polypeptide"
DIQMTQTTSSLSASLGDRVTISCRASQDISKYLNWYQQKPDGTVKLLIYHTSRLHSGVPSRFSGSGSGTDYSLTISNLEQEDIATYFCQQGNTLPYTFGGGTKLEITGSTSGSGKPGSGEGSTKGEVKLQESGPGLVAPSQSLSVTCTVSGVSLPDYGVSWIRQPPRKGLEWLGVIWGSETTYYNSALKSRLTIIKDNSKSQVFLKMNSLQTDDTAIYYCAKHYYYGGSYAMDYWGQGTSVTVSSE

SEQ ID NO: 2022 - protein, 245 aa, synthetic construct
  REGION 1..245: note = source = /note="Description of Artificial Sequence: Synthetic polypeptide"
DIQMTQTTSSLSASLGDRVTISCRASQDISKYLNWYQQKPDGTVKLLIYHTSRLHSGVPSRFSGSGSGTDYSLTISNLEQEDIATYFCQQGNTLPYTFGGGTKLEITGSTSGSGKPGSGEGSTKGEVKLQESGPGLVAPSQSLSVTCTVSGVSLPDYGVSWIRQPPRKGLEWLGVIWGSETTYYNSALKSRLTIIKDNSKSQVFLKMNSLQTDDTAIYYCAKHYYYGGSYAMDYWGQGTSVTVSS

SEQ ID NO: 2023 - protein, 464 aa, synthetic construct
  REGION 1..464: note = source = /note="Description of Artificial Sequence: Synthetic polypeptide"
QVQLLESGAELVRPGSSVKISCKASGYAFSSYWMNWVKQRPGQGLEWIGQIYPGDGDTNYNGKFKGQATLTADKSSSTAYMQLSGLTSEDSAVYSCARKTISSVVDFYFDYWGQGTTVTGGGSGGGSGGGSGGGSELVLTQSPKFMSTSVGDRVSVTCKASQNVGTNVAWYQQKPGQSPKPLIYSATYRNSGVPDRFTGSGSGTDFTLTITNVQSKDLADYFCQYNRYPYTSFFFTKLEIKRRSKIEVMYPPPYLDNEKSNGTIIHVKGKHLCPSPLFPGPSKPFWVLVVVGGVLACYSLLVTVAFIIFWVRSKRSRLLHSDYMNMTPRRPGPTRKHYQPYAPPRDFAAYRSRVKFSRSADAPAYQQGQNQLYNELNLGRREEYDVLDKRRGRDPEMGGKPRRKNPQEGLYNELQKDKMAEAYSEIGMKGERRRGKGHDGLYQGLSTATKDTYDALHMQALPPR

SEQ ID NO: 2024 - protein, 439 aa, synthetic construct
  REGION 1..439: note = source = /note="Description of Artificial Sequence: Synthetic polypeptide"
DIQMTQTTSSLSASLGDRVTISCRASQDISKYLNWYQQKPDGTVKLLIYHTSRLHSGVPSRFSGSGSGTDYSLTISNLEQEDIATYFCQQGNTLPYTFGGGTKLEITGSTSGSGKPGSGEGSTKGEVKLQESGPGLVAPSQSLSVTCTVSGVSLPDYGVSWIRQPPRKGLEWLGVIWGSETTYYNSALKSRLTIIKDNSKSQVFLKMNSLQTDDTAIYYCAKHYYYGGSYAMDYWGQGTSVTVSSESKYGPPCPPCPMFWVLVVVGGVLACYSLLVTVAFIIFWVKRGRKKLLYIFKQPFMRPVQTTQEEDGCSCRFEEEEGGCELRVKFSRSADAPAYQQGQNQLYNELNLGRREEYDVLDKRRGRDPEMGGKPRRKNPQEGLYNELQKDKMAEAYSEIGMKGERRRGKGHDGLYQGLSTATKDTYDALHMQALPPRL

SEQ ID NO: 2025 - protein, 819 aa, synthetic construct
  REGION 1..819: note = source = /note="Description of Artificial Sequence: Synthetic polypeptide"
DIQMTQTTSSLSASLGDRVTISCRASQDISKYLNWYQQKPDGTVKLLIYHTSRLHSGVPSRFSGSGSGTDYSLTISNLEQEDIATYFCQQGNTLPYTFGGGTKLEITGSTSGSGKPGSGEGSTKGEVKLQESGPGLVAPSQSLSVTCTVSGVSLPDYGVSWIRQPPRKGLEWLGVIWGSETTYYNSALKSRLTIIKDNSKSQVFLKMNSLQTDDTAIYYCAKHYYYGGSYAMDYWGQGTSVTVSSESKYGPPCPPCPMFWVLVVVGGVLACYSLLVTVAFIIFWVKRGRKKLLYIFKQPFMRPVQTTQEEDGCSCRFEEEEGGCELRVKFSRSADAPAYQQGQNQLYNELNLGRREEYDVLDKRRGRDPEMGGKPRRKNPQEGLYNELQKDKMAEAYSEIGMKGERRRGKGHDGLYQGLSTATKDTYDALHMQALPPRLEGGGEGRGSLLTCGDVEENPGPRMLLLVTSLLLCELPHPAFLLIPRKVCNGIGIGEFKDSLSINATNIKHFKNCTSISGDLHILPVAFRGDSFTHTPPLDPQELDILKTVKEITGFLLIQAWPENRTDLHAFENLEIIRGRTKQHGQFSLAVVSLNITSLGLRSLKEISDGDVIISGNKNLCYANTINWKKLFGTSGQKTKIISNRGENSCKATGQVCHALCSPEGCWGPEPRDCVSCRNVSRGRECVDKCNLLEGEPREFVENSECIQCHPECLPQAMNITCTGRGPDNCIQCAHYIDGPHCVKTCPAGVMGENNTLVWKYADAGHVCHLCHPNCTYGCTGPGLEGCPTNGPKIPSIATGMVGALLLLLVVALGIGLFM

SEQ ID NO: 2026 - protein, 467 aa, synthetic construct
  REGION 1..467: note = source = /note="Description of Artificial Sequence: Synthetic polypeptide"
DIQMTQTTSSLSASLGDRVTISCRASQDISKYLNWYQQKPDGTVKLLIYHTSRLHSGVPSRFSGSGSGTDYSLTISNLEQEDIATYFCQQGNTLPYTFGGGTKLEITGSTSGSGKPGSGEGSTKGEVKLQESGPGLVAPSQSLSVTCTVSGVSLPDYGVSWIRQPPRKGLEWLGVIWGSETTYYNSALKSRLTIIKDNSKSQVFLKMNSLQTDDTAIYYCAKHYYYGGSYAMDYWGQGTSVTVSSAAAIEVMYPPPYLDNEKSNGTIIHVKGKHLCPSPLFPGPSKPFWVLVVVGGVLACYSLLVTVAFIIFWVRSKRSRLLHSDYMNMTPRRPGPTRKHYQPYAPPRDFAAYRSRVKFSRSADAPAYQQGQNQLYNELNLGRREEYDVLDKRRGRDPEMGGKPRRKNPQEGLYNELQKDKMAEAYSEIGMKGERRRGKGHDGLYQGLSTATKDTYDALHMQALPPR

SEQ ID NO: 2027 - protein, 119 aa, synthetic construct
  REGION 1..119: note = source = /note="Description of Artificial Sequence: Synthetic polypeptide"
QVQLLESGAELVRPGSSVKISCKASGYAFSSYWMNWVKQRPGQGLEWIGQIYPGDGDTNYNGKFKGQATLTADKSSSTAYMQLSGLTSEDSAVYSCARKTISSVVDFYFDYWGQGTTVT

SEQ ID NO: 2028 - protein, 111 aa, synthetic construct
  REGION 1..111: note = source = /note="Description of Artificial Sequence: Synthetic polypeptide"
ELVLTQSPKFMSTSVGDRVSVTCKASQNVGTNVAWYQQKPGQSPKPLIYSATYRNSGVPDRFTGSGSGTDFTLTITNVQSKDLADYFYFCQYNRYPYTSGGGTKLEIKRRS

1. An isolated nucleic acid molecule encoding an anti-target CAR (chimeric antigen receptor) polypeptide, wherein the encoded anti-target CAR polypeptide comprises:
a) an extracellular ligand that binds to a target CAR polypeptide;
b) a transmembrane domain; and
c) an intracellular signaling domain comprising a stimulatory domain.

2. The isolated anti-target CAR nucleic acid molecule of claim 1, wherein the ligand comprises a cognate antigen molecule or an antibody molecule that binds to the target CAR polypeptide.

3. The isolated anti-target CAR nucleic acid molecule of claim 1, wherein the ligand comprises an anti-idiotypic antibody molecule that binds to an extracellular domain of the target CAR polypeptide.

4. The isolated anti-target CAR nucleic acid molecule of claim 1, wherein the ligand binds an antigen binding domain in the target CAR polypeptide, a hinge domain in the target CAR polypeptide, or a junction between an antigen binding domain and a hinge domain in the target CAR polypeptide.

5. The isolated anti-target CAR nucleic acid molecule of claim 1, wherein the ligand comprises a cognate antigen molecule that binds the target CAR polypeptide.

6. The isolated anti-target CAR nucleic acid molecule of claim 1, wherein the target CAR polypeptide is a CD19CAR polypeptide and the ligand comprises an anti-idiotypic antibody that binds said CD19CAR polypeptide.

7. The isolated anti-target CAR nucleic acid molecule of claim 1, wherein the target CAR polypeptide is a CD19CAR polypeptide and the ligand comprises CD19 or a fragment thereof that binds said CD19CAR polypeptide.

8. The isolated anti-target CAR nucleic acid molecule of claim 1, wherein:
(i) the target CAR polypeptide is a CD33CAR polypeptide and the ligand comprises CD33 or a fragment thereof that binds said CD33CAR polypeptide, or the ligand comprises an antibody molecule that binds said CD33CAR polypeptide;
(ii) the target CAR polypeptide is an EGFRvIIICAR polypeptide, and the ligand comprises EGFRvIII or a fragment thereof that binds said EGFRvIIICAR polypeptide, or the ligand comprises an antibody molecule that binds said EGFRvIIICAR polypeptide;
(iii) the target CAR polypeptide is a mesothelinCAR polypeptide, and the ligand comprises mesothelin or a fragment thereof that binds said mesothelinCAR polypeptide, or the ligand comprises an antibody molecule that binds said mesothelinCAR polypeptide;
(iv) the target CAR polypeptide is a BCMACAR polypeptide, and the ligand comprises BCMA or a fragment thereof that binds said BCMACAR polypeptide, or the ligand comprises an antibody molecule that binds said BCMACAR polypeptide;
(v) the target CAR polypeptide is a CD20CAR polypeptide, and the ligand comprises CD20 or a fragment thereof that binds said CD20CAR polypeptide, or the ligand comprises an antibody molecule that binds said CD20CAR polypeptide;
(vi) the target CAR polypeptide is a CD22CAR polypeptide, and the ligand comprises CD22 or a fragment thereof that binds said CD22CAR polypeptide, or the ligand comprises an antibody molecule that binds said CD22CAR polypeptide;
(vii) the target CAR polypeptide is a CD123CAR polypeptide, and the ligand comprises CD123 or a fragment thereof that binds said CD123CAR polypeptide, or the ligand comprises an antibody molecule that binds said CD123CAR polypeptide; or
(viii) the target CAR polypeptide is a CLL-1CAR polypeptide, and the ligand comprises CLL-1 or a fragment thereof that binds said CLL-1CAR polypeptide, or the ligand comprises an antibody molecule that binds said CLL-1CAR polypeptide.

9. (canceled)

10. The isolated anti-target CAR nucleic acid molecule of claim 1, wherein the target CAR comprises i) an anti-CD19 binding domain, ii) a transmembrane domain, and iii) an intracellular signaling domain.

11. A vector comprising the nucleic acid molecule of claim 1.

12. A cell comprising the nucleic acid molecule of claim 1.

13. A method of making a cell comprising transducing a T cell with the nucleic acid molecule of claim 1.

14. A method of generating a population of RNA-engineered cells comprising introducing an in vitro transcribed RNA or synthetic RNA into a cell, where the RNA comprises the nucleic acid molecule of claim 1.

15. An isolated anti-target CAR (chimeric antigen receptor) polypeptide, which comprises:
a) an extracellular ligand that binds to a target CAR polypeptide,
b) a transmembrane domain, and
c) an intracellular signaling domain comprising a stimulatory domain.

16-21. (canceled)

22. The isolated anti-target CAR polypeptide of claim 15, wherein:
(i) the target CAR polypeptide is a CD33CAR polypeptide and the ligand comprises CD33 or a fragment thereof that binds said CD33CAR polypeptide, or the ligand comprises an antibody molecule that binds said CD33CAR polypeptide;
(ii) the target CAR polypeptide is an EGFRVIIICAR polypeptide, and the ligand comprises EGFRvIII or a fragment thereof that binds said EGFRvIIICAR polypeptide, or the ligand comprises an antibody molecule that binds said EGFRvIIICAR polypeptide;
(iii) the target CAR polypeptide is a mesothelinCAR polypeptide, and the ligand comprises mesothelin or a fragment thereof that binds said mesothelinCAR polypeptide, or the ligand comprises an antibody molecule that binds said mesothelinCAR polypeptide;
(iv) the target CAR polypeptide is a BCMACAR polypeptide, and the ligand comprises BCMA or a fragment thereof that binds said BCMACAR polypeptide, or the ligand comprises an antibody molecule that binds said BCMACAR polypeptide;
(v) the target CAR polypeptide is a CD20CAR polypeptide, and the ligand comprises CD20 or a fragment thereof that binds said CD20CAR polypeptide, or the ligand comprises an antibody molecule that binds said CD20CAR polypeptide;
(vi) the target CAR polypeptide is a CD22CAR polypeptide, and the ligand comprises CD22 or a fragment thereof that binds said CD22CAR polypeptide, or the ligand comprises an antibody molecule that binds said CD22CAR polypeptide;
(vii) the target CAR polypeptide is a CD123CAR polypeptide, and the ligand comprises CD123 or a fragment thereof that binds said CD123CAR polypeptide, or the ligand comprises an antibody molecule that binds said CD123CAR polypeptide; or
(viii) the target CAR polypeptide is a CLL-1CAR polypeptide, and the ligand comprises CLL-1 or a fragment thereof that binds said CLL-1CAR polypeptide, or the ligand comprises an antibody molecule that binds said CLL-1CAR polypeptide.

23. (canceled)

24. The isolated anti-target CAR polypeptide of claim 15, wherein the target CAR polypeptide comprises i) an anti-CD19 binding domain, ii) a transmembrane domain, and iii) an intracellular signaling domain.

25. A cell comprising the anti-target CAR polypeptide of claim 15.

26. A cell engineered to express the anti-target CAR polypeptide of claim 15.

27. A method of treating a subject having, or at risk of having a disease or condition associated with expression of a target CAR, comprising administering to the subject an effective number of cells comprising the anti-target CAR polypeptide of claim 15.

28-34. (canceled)

35. A method of reducing the number of target CAR-expressing cells present in a subject, comprising administering to the subject an effective number of cells comprising the anti-target CAR polypeptide of claim 15.

36-53. (canceled)
